United States Patent Application Publication US 2011/0034534 A1 - sequence listing, part 2

SEQ ID NO: 34088 - RNA, 19 nt, artificial
  Chemically synthesized
aaaaaucauugauugucag

SEQ ID NO: 34089 - RNA, 19 nt, artificial
  Chemically synthesized
aaguaaaaccguuugcugg

SEQ ID NO: 34090 - RNA, 19 nt, artificial
  Chemically synthesized
agacaccuauggaauuguc

SEQ ID NO: 34091 - RNA, 19 nt, artificial
  Chemically synthesized
cucagacguuuuucggcuu

SEQ ID NO: 34092 - RNA, 19 nt, artificial
  Chemically synthesized
ugauugucagcuacuaaug

SEQ ID NO: 34093 - RNA, 19 nt, artificial
  Chemically synthesized
aggucuacaugaggaacuc

SEQ ID NO: 34094 - RNA, 19 nt, artificial
  Chemically synthesized
ugcugaucauuuauauguc

SEQ ID NO: 34095 - RNA, 19 nt, artificial
  Chemically synthesized
cucuugagcagucagcaac

SEQ ID NO: 34096 - RNA, 19 nt, artificial
  Chemically synthesized
uagaugugcauuuuuguga

SEQ ID NO: 34097 - RNA, 19 nt, artificial
  Chemically synthesized
uuaccagugcugaucauuu

SEQ ID NO: 34098 - RNA, 19 nt, artificial
  Chemically synthesized
acaugaaccaaguggaccu

SEQ ID NO: 34099 - RNA, 19 nt, artificial
  Chemically synthesized
cagauugaaaaggacaccu

SEQ ID NO: 34100 - RNA, 19 nt, artificial
  Chemically synthesized
uguccugcuuucuggagug

SEQ ID NO: 34101 - RNA, 19 nt, artificial
  Chemically synthesized
acggaagaacauagaacuc

SEQ ID NO: 34102 - RNA, 19 nt, artificial
  Chemically synthesized
uaaagaggcugaaagaggc

SEQ ID NO: 34103 - RNA, 19 nt, artificial
  Chemically synthesized
cucuaagagaagcacuuug

SEQ ID NO: 34104 - RNA, 19 nt, artificial
  Chemically synthesized
caugaaccaaguggaccuu

SEQ ID NO: 34105 - RNA, 19 nt, artificial
  Chemically synthesized
uucccuguccaaccucugu

SEQ ID NO: 34106 - RNA, 19 nt, artificial
  Chemically synthesized
uuugugaaaugaaaacaug

SEQ ID NO: 34107 - RNA, 19 nt, artificial
  Chemically synthesized
uuacaugcauuugagguca

SEQ ID NO: 34108 - RNA, 19 nt, artificial
  Chemically synthesized
uuccugacaaucaacucua

SEQ ID NO: 34109 - RNA, 19 nt, artificial
  Chemically synthesized
uuacaggcaccgagaaugu

SEQ ID NO: 34110 - RNA, 19 nt, artificial
  Chemically synthesized
cucuauaagagagauccag

SEQ ID NO: 34111 - RNA, 19 nt, artificial
  Chemically synthesized
gugccugagaguauuuagg

SEQ ID NO: 34112 - RNA, 19 nt, artificial
  Chemically synthesized
acguaucugagcucucucu

SEQ ID NO: 34113 - RNA, 19 nt, artificial
  Chemically synthesized
uccauuaugauucuuuguu

SEQ ID NO: 34114 - RNA, 19 nt, artificial
  Chemically synthesized
aucuacuggguggacagca

SEQ ID NO: 34115 - RNA, 19 nt, artificial
  Chemically synthesized
cucucucuggucaauuuug

SEQ ID NO: 34116 - RNA, 19 nt, artificial
  Chemically synthesized
caggaucuggugaugaugg

SEQ ID NO: 34117 - RNA, 19 nt, artificial
  Chemically synthesized
gucaaucuugcaacaaccu

SEQ ID NO: 34118 - RNA, 19 nt, artificial
  Chemically synthesized
caucuucacuucuaaaugc

SEQ ID NO: 34119 - RNA, 19 nt, artificial
  Chemically synthesized
gugcugaucauuuauaugu

SEQ ID NO: 34120 - RNA, 19 nt, artificial
  Chemically synthesized
uucccuuagcuauggaaac

SEQ ID NO: 34121 - RNA, 19 nt, artificial
  Chemically synthesized
uugugaucaaugaaacugg

SEQ ID NO: 34122 - RNA, 19 nt, artificial
  Chemically synthesized
uuaacaggcaaguccaacu

SEQ ID NO: 34123 - RNA, 19 nt, artificial
  Chemically synthesized
auguagaugugcauuuuug

SEQ ID NO: 34124 - RNA, 19 nt, artificial
  Chemically synthesized
ugucuguagcuccucaacu

SEQ ID NO: 34125 - RNA, 19 nt, artificial
  Chemically synthesized
gggauguuucagcucuucc

SEQ ID NO: 34126 - RNA, 19 nt, artificial
  Chemically synthesized
ucugagcucucucugguca

SEQ ID NO: 34127 - RNA, 19 nt, artificial
  Chemically synthesized
agaagacaugaaccaagug

SEQ ID NO: 34128 - RNA, 19 nt, artificial
  Chemically synthesized
uauauuccaaaguauacuu

SEQ ID NO: 34129 - RNA, 19 nt, artificial
  Chemically synthesized
caguucuucccuguccaac

SEQ ID NO: 34130 - RNA, 19 nt, artificial
  Chemically synthesized
uaacagauaagcaagagag

SEQ ID NO: 34131 - RNA, 19 nt, artificial
  Chemically synthesized
uuuauaugucaacguaucu

SEQ ID NO: 34132 - RNA, 19 nt, artificial
  Chemically synthesized
ucccuuagcuauggaaacu

SEQ ID NO: 34133 - RNA, 19 nt, artificial
  Chemically synthesized
gcaaguccaacucaagguc

SEQ ID NO: 34134 - RNA, 19 nt, artificial
  Chemically synthesized
ugaaaaagcagcuaccagg

SEQ ID NO: 34135 - RNA, 19 nt, artificial
  Chemically synthesized
cccugaaaaaaaggagcug

SEQ ID NO: 34136 - RNA, 19 nt, artificial
  Chemically synthesized
gaaucucagacguuuuucg

SEQ ID NO: 34137 - RNA, 19 nt, artificial
  Chemically synthesized
gcaucaucuuuggagaagc

SEQ ID NO: 34138 - RNA, 19 nt, artificial
  Chemically synthesized
ggguucaaaaugucuguag

SEQ ID NO: 34139 - RNA, 19 nt, artificial
  Chemically synthesized
uguagcuccucaacucacc

SEQ ID NO: 34140 - RNA, 19 nt, artificial
  Chemically synthesized
aguaaaaccguuugcuggg

SEQ ID NO: 34141 - RNA, 19 nt, artificial
  Chemically synthesized
aucuuaccagugcugauca

SEQ ID NO: 34142 - RNA, 19 nt, artificial
  Chemically synthesized
auaauaagcuaaagaggcu

SEQ ID NO: 34143 - RNA, 19 nt, artificial
  Chemically synthesized
augugcauuuuugugaaau

SEQ ID NO: 34144 - RNA, 19 nt, artificial
  Chemically synthesized
agagagaauguagauauug

SEQ ID NO: 34145 - RNA, 19 nt, artificial
  Chemically synthesized
aacucaagguccaugccuc

SEQ ID NO: 34146 - RNA, 19 nt, artificial
  Chemically synthesized
uuguauucagugagggucu

SEQ ID NO: 34147 - RNA, 19 nt, artificial
  Chemically synthesized
caccuaauguuuaugagcc

SEQ ID NO: 34148 - RNA, 19 nt, artificial
  Chemically synthesized
acugucuuucagauacaug

SEQ ID NO: 34149 - RNA, 19 nt, artificial
  Chemically synthesized
auuuauaugucaacguauc

SEQ ID NO: 34150 - RNA, 19 nt, artificial
  Chemically synthesized
ugagcuacugcacuacugg

SEQ ID NO: 34151 - RNA, 19 nt, artificial
  Chemically synthesized
gaagaugaugagcuacugc

SEQ ID NO: 34152 - RNA, 19 nt, artificial
  Chemically synthesized
ucuaaaugcauauccugag

SEQ ID NO: 34153 - RNA, 19 nt, artificial
  Chemically synthesized
ucagugagggucuucuuac

SEQ ID NO: 34154 - RNA, 19 nt, artificial
  Chemically synthesized
ucuggaaugggaagacacc

SEQ ID NO: 34155 - RNA, 19 nt, artificial
  Chemically synthesized
uacuuuguauauuccaaag

SEQ ID NO: 34156 - RNA, 19 nt, artificial
  Chemically synthesized
cagcuaccagguguucuac

SEQ ID NO: 34157 - RNA, 19 nt, artificial
  Chemically synthesized
aagacaccuauggaauugu

SEQ ID NO: 34158 - RNA, 19 nt, artificial
  Chemically synthesized
uacaggcaccgagaauguu

SEQ ID NO: 34159 - RNA, 19 nt, artificial
  Chemically synthesized
gaggaacucuaaguauccc

SEQ ID NO: 34160 - RNA, 19 nt, artificial
  Chemically synthesized
gauguuuuucaugguucug

SEQ ID NO: 34161 - RNA, 19 nt, artificial
  Chemically synthesized
cacagcaucaucuuuggag

SEQ ID NO: 34162 - RNA, 19 nt, artificial
  Chemically synthesized
auuuaggcagauugaaaag

SEQ ID NO: 34163 - RNA, 19 nt, artificial
  Chemically synthesized
ucagcuacuaaugauguuu

SEQ ID NO: 34164 - RNA, 19 nt, artificial
  Chemically synthesized
gaucauuuauaugucaacg

SEQ ID NO: 34165 - RNA, 19 nt, artificial
  Chemically synthesized
augagcuacugcacuacug

SEQ ID NO: 34166 - RNA, 19 nt, artificial
  Chemically synthesized
aaaggagcugaggaaagug

SEQ ID NO: 34167 - RNA, 19 nt, artificial
  Chemically synthesized
uuaugauucuuuguuacag

SEQ ID NO: 34168 - RNA, 19 nt, artificial
  Chemically synthesized
guguuucccuuagcuaugg

SEQ ID NO: 34169 - RNA, 19 nt, artificial
  Chemically synthesized
agaggcuugcauaauaagc

SEQ ID NO: 34170 - RNA, 19 nt, artificial
  Chemically synthesized
guucugguugccuugguag

SEQ ID NO: 34171 - RNA, 19 nt, artificial
  Chemically synthesized
cuaaaugcauauccugagc

SEQ ID NO: 34172 - RNA, 19 nt, artificial
  Chemically synthesized
augaaaaagcagcuaccag

SEQ ID NO: 34173 - RNA, 19 nt, artificial
  Chemically synthesized
ugaugagcuacugcacuac

SEQ ID NO: 34174 - RNA, 19 nt, artificial
  Chemically synthesized
ugaaguauaagaagggugg

SEQ ID NO: 34175 - RNA, 19 nt, artificial
  Chemically synthesized
uugucagcuacuaaugaug

SEQ ID NO: 34176 - RNA, 19 nt, artificial
  Chemically synthesized
aagaaguaaaaccguuugc

SEQ ID NO: 34177 - RNA, 19 nt, artificial
  Chemically synthesized
uguuucagcucuuccaccu

SEQ ID NO: 34178 - RNA, 19 nt, artificial
  Chemically synthesized
gguugccuugguaggauug

SEQ ID NO: 34179 - RNA, 19 nt, artificial
  Chemically synthesized
cugaggauuuaagggaugg

SEQ ID NO: 34180 - RNA, 19 nt, artificial
  Chemically synthesized
ggacaccuuuuaacucacc

SEQ ID NO: 34181 - RNA, 19 nt, artificial
  Chemically synthesized
gaagacaccuauggaauug

SEQ ID NO: 34182 - RNA, 19 nt, artificial
  Chemically synthesized
aauaagcuaaagaggcuga

SEQ ID NO: 34183 - RNA, 19 nt, artificial
  Chemically synthesized
ucagccucuacaggacuga

SEQ ID NO: 34184 - RNA, 19 nt, artificial
  Chemically synthesized
gaccacaggguucaaaaug

SEQ ID NO: 34185 - RNA, 19 nt, artificial
  Chemically synthesized
aucuuagugccugagagua

SEQ ID NO: 34186 - RNA, 19 nt, artificial
  Chemically synthesized
cguaucugagcucucucug

SEQ ID NO: 34187 - RNA, 19 nt, artificial
  Chemically synthesized
uacaugaggaacucuaagu

SEQ ID NO: 34188 - RNA, 19 nt, artificial
  Chemically synthesized
gacaccuauggaauugucc

SEQ ID NO: 34189 - RNA, 19 nt, artificial
  Chemically synthesized
aaaaggaagacuagaggcu

SEQ ID NO: 34190 - RNA, 19 nt, artificial
  Chemically synthesized
gcagauugaaaaggacacc

SEQ ID NO: 34191 - RNA, 19 nt, artificial
  Chemically synthesized
accuugagaccacaggguu

SEQ ID NO: 34192 - RNA, 19 nt, artificial
  Chemically synthesized
ugaaaaaaaggagcugagg

SEQ ID NO: 34193 - RNA, 19 nt, artificial
  Chemically synthesized
augaggaacucuaaguauc

SEQ ID NO: 34194 - RNA, 19 nt, artificial
  Chemically synthesized
uugaggaaucucagacguu

SEQ ID NO: 34195 - RNA, 19 nt, artificial
  Chemically synthesized
agaagcacuuugggauucu

SEQ ID NO: 34196 - RNA, 19 nt, artificial
  Chemically synthesized
cuaaagaggcugaaagagg

SEQ ID NO: 34197 - RNA, 19 nt, artificial
  Chemically synthesized
ccugagaguauuuaggcag

SEQ ID NO: 34198 - RNA, 19 nt, artificial
  Chemically synthesized
uagugcuuaaaaaucauug

SEQ ID NO: 34199 - RNA, 19 nt, artificial
  Chemically synthesized
uacaugguugugaccugag

SEQ ID NO: 34200 - RNA, 19 nt, artificial
  Chemically synthesized
uuuuugugaaaugaaaaca

SEQ ID NO: 34201 - RNA, 19 nt, artificial
  Chemically synthesized
auuuuugugaaaugaaaac

SEQ ID NO: 34202 - RNA, 19 nt, artificial
  Chemically synthesized
ccauuuaacaggcaagucc

SEQ ID NO: 34203 - RNA, 19 nt, artificial
  Chemically synthesized
cauaauaagcuaaagaggc

SEQ ID NO: 34204 - RNA, 19 nt, artificial
  Chemically synthesized
cuuccugacaaucaacucu

SEQ ID NO: 34205 - RNA, 19 nt, artificial
  Chemically synthesized
acuaacagauaagcaagag

SEQ ID NO: 34206 - RNA, 19 nt, artificial
  Chemically synthesized
augucuguagcuccucaac

SEQ ID NO: 34207 - RNA, 19 nt, artificial
  Chemically synthesized
gcacuuugggauucuuucc

SEQ ID NO: 34208 - RNA, 19 nt, artificial
  Chemically synthesized
ucauugauugucagcuacu

SEQ ID NO: 34209 - RNA, 19 nt, artificial
  Chemically synthesized
caaucuugcaacaaccugc

SEQ ID NO: 34210 - RNA, 19 nt, artificial
  Chemically synthesized
uacugcacuacugggcaga

SEQ ID NO: 34211 - RNA, 19 nt, artificial
  Chemically synthesized
auaaaaaguauauguuagg

SEQ ID NO: 34212 - RNA, 19 nt, artificial
  Chemically synthesized
cuuccaccuacagaaggag

SEQ ID NO: 34213 - RNA, 19 nt, artificial
  Chemically synthesized
acaggcaccgagaauguug

SEQ ID NO: 34214 - RNA, 19 nt, artificial
  Chemically synthesized
auauggguugcauuugguc

SEQ ID NO: 34215 - RNA, 19 nt, artificial
  Chemically synthesized
ugaaacugggcuguacuuu

SEQ ID NO: 34216 - RNA, 19 nt, artificial
  Chemically synthesized
augccucuggaaugggaag

SEQ ID NO: 34217 - RNA, 19 nt, artificial
  Chemically synthesized
gaaaaggaagacuagaggc

SEQ ID NO: 34218 - RNA, 19 nt, artificial
  Chemically synthesized
ugucuccuugugauguuuu

SEQ ID NO: 34219 - RNA, 19 nt, artificial
  Chemically synthesized
cuuaccagugcugaucauu

SEQ ID NO: 34220 - RNA, 19 nt, artificial
  Chemically synthesized
gcuuccugacaaucaacuc

SEQ ID NO: 34221 - RNA, 19 nt, artificial
  Chemically synthesized
aucuggugaugauggaggg

SEQ ID NO: 34222 - RNA, 19 nt, artificial
  Chemically synthesized
uugccuugguaggauuggg

SEQ ID NO: 34223 - RNA, 19 nt, artificial
  Chemically synthesized
ucuuuggagaagcaaauag

SEQ ID NO: 34224 - RNA, 19 nt, artificial
  Chemically synthesized
guaucugagcucucucugg

SEQ ID NO: 34225 - RNA, 19 nt, artificial
  Chemically synthesized
gugaaacuaacagauaagc

SEQ ID NO: 34226 - RNA, 19 nt, artificial
  Chemically synthesized
ucuuuguuacaggcaccga

SEQ ID NO: 34227 - RNA, 19 nt, artificial
  Chemically synthesized
gugaaguauaagaagggug

SEQ ID NO: 34228 - RNA, 19 nt, artificial
  Chemically synthesized
aaaggacaccuuuuaacuc

SEQ ID NO: 34229 - RNA, 19 nt, artificial
  Chemically synthesized
uuguccugcuuucuggagu

SEQ ID NO: 34230 - RNA, 19 nt, artificial
  Chemically synthesized
uuagugccugagaguauuu

SEQ ID NO: 34231 - RNA, 19 nt, artificial
  Chemically synthesized
ucuuuccauuaugauucuu

SEQ ID NO: 34232 - RNA, 19 nt, artificial
  Chemically synthesized
aaggagcugaggaaagugg

SEQ ID NO: 34233 - RNA, 19 nt, artificial
  Chemically synthesized
aaggucuacaugaggaacu

SEQ ID NO: 34234 - RNA, 19 nt, artificial
  Chemically synthesized
ugccucuggaaugggaaga

SEQ ID NO: 34235 - RNA, 19 nt, artificial
  Chemically synthesized
uauucagugagggucuucu

SEQ ID NO: 34236 - RNA, 19 nt, artificial
  Chemically synthesized
acaaucaacucuaauagug

SEQ ID NO: 34237 - RNA, 19 nt, artificial
  Chemically synthesized
acugagaagaaguaaaacc

SEQ ID NO: 34238 - RNA, 19 nt, artificial
  Chemically synthesized
uaucugagcucucucuggu

SEQ ID NO: 34239 - RNA, 19 nt, artificial
  Chemically synthesized
ucaccuaauguuuaugagc

SEQ ID NO: 34240 - RNA, 19 nt, artificial
  Chemically synthesized
agcagcuaccagguguucu

SEQ ID NO: 34241 - RNA, 19 nt, artificial
  Chemically synthesized
ucuaagagaagcacuuugg

SEQ ID NO: 34242 - RNA, 19 nt, artificial
  Chemically synthesized
uuaacucaccucucaaggu

SEQ ID NO: 34243 - RNA, 19 nt, artificial
  Chemically synthesized
aacguaucugagcucucuc

SEQ ID NO: 34244 - RNA, 19 nt, artificial
  Chemically synthesized
uuuggagaagcaaauaggc

SEQ ID NO: 34245 - RNA, 19 nt, artificial
  Chemically synthesized
agauuuugaaugcuuccug

SEQ ID NO: 34246 - RNA, 19 nt, artificial
  Chemically synthesized
gucaacguaucugagcucu

SEQ ID NO: 34247 - RNA, 19 nt, artificial
  Chemically synthesized
guccaacucaagguccaug

SEQ ID NO: 34248 - RNA, 19 nt, artificial
  Chemically synthesized
caugugaagagggagaagc

SEQ ID NO: 34249 - RNA, 19 nt, artificial
  Chemically synthesized
uaagagagauccagcuugc

SEQ ID NO: 34250 - RNA, 19 nt, artificial
  Chemically synthesized
gugaucaaugaaacugggc

SEQ ID NO: 34251 - RNA, 19 nt, artificial
  Chemically synthesized
auuccaaaguauacuuccg

SEQ ID NO: 34252 - RNA, 19 nt, artificial
  Chemically synthesized
gcuacuaaugauguuuucc

SEQ ID NO: 34253 - RNA, 19 nt, artificial
  Chemically synthesized
gugauguuuuucaugguuc

SEQ ID NO: 34254 - RNA, 19 nt, artificial
  Chemically synthesized
auaagcaagagagauguuu

SEQ ID NO: 34255 - RNA, 19 nt, artificial
  Chemically synthesized
uuuucaugguucugguugc

SEQ ID NO: 34256 - RNA, 19 nt, artificial
  Chemically synthesized
agcaugaaaaagcagcuac

SEQ ID NO: 34257 - RNA, 19 nt, artificial
  Chemically synthesized
agauacaugguugugaccu

SEQ ID NO: 34258 - RNA, 19 nt, artificial
  Chemically synthesized
cuugugauguuuuucaugg

SEQ ID NO: 34259 - RNA, 19 nt, artificial
  Chemically synthesized
uuugaggucaaguaagaag

SEQ ID NO: 34260 - RNA, 19 nt, artificial
  Chemically synthesized
cugaagaagagagggaacc

SEQ ID NO: 34261 - RNA, 19 nt, artificial
  Chemically synthesized
cuuacaugcauuugagguc

SEQ ID NO: 34262 - RNA, 19 nt, artificial
  Chemically synthesized
cccuuagcuauggaaacuc

SEQ ID NO: 34263 - RNA, 19 nt, artificial
  Chemically synthesized
accaaguggaccuugagac

SEQ ID NO: 34264 - RNA, 19 nt, artificial
  Chemically synthesized
uauuaggaaaauauggguu

SEQ ID NO: 34265 - RNA, 19 nt, artificial
  Chemically synthesized
cuacacucaucuuagugcc

SEQ ID NO: 34266 - RNA, 19 nt, artificial
  Chemically synthesized
uuuucggcuuauauaagcu

SEQ ID NO: 34267 - RNA, 19 nt, artificial
  Chemically synthesized
ucaacguaucugagcucuc

SEQ ID NO: 34268 - RNA, 19 nt, artificial
  Chemically synthesized
accuuuuaacucaccucuc

SEQ ID NO: 34269 - RNA, 19 nt, artificial
  Chemically synthesized
uucggcuuauauaagcucu

SEQ ID NO: 34270 - RNA, 19 nt, artificial
  Chemically synthesized
uauaagagagauccagcuu

SEQ ID NO: 34271 - RNA, 19 nt, artificial
  Chemically synthesized
ggaaucucagacguuuuuc

SEQ ID NO: 34272 - RNA, 19 nt, artificial
  Chemically synthesized
uaccagguguucuacacuc

SEQ ID NO: 34273 - RNA, 19 nt, artificial
  Chemically synthesized
aacucaccuaauguuuaug

SEQ ID NO: 34274 - RNA, 19 nt, artificial
  Chemically synthesized
caaguccaacucaaggucc

SEQ ID NO: 34275 - RNA, 19 nt, artificial
  Chemically synthesized
ugucaacguaucugagcuc

SEQ ID NO: 34276 - RNA, 19 nt, artificial
  Chemically synthesized
aucauuuauaugucaacgu

SEQ ID NO: 34277 - RNA, 19 nt, artificial
  Chemically synthesized
ucuuacaugcauuugaggu

SEQ ID NO: 34278 - RNA, 19 nt, artificial
  Chemically synthesized
acuuuguauauuccaaagu

SEQ ID NO: 34279 - RNA, 19 nt, artificial
  Chemically synthesized
aaaauauggguugcauuug

SEQ ID NO: 34280 - RNA, 19 nt, artificial
  Chemically synthesized
uuugaggaaucucagacgu

SEQ ID NO: 34281 - RNA, 19 nt, artificial
  Chemically synthesized
ucaaucuuaccagugcuga

SEQ ID NO: 34282 - RNA, 19 nt, artificial
  Chemically synthesized
uugagcagucagcaacagg

SEQ ID NO: 34283 - RNA, 19 nt, artificial
  Chemically synthesized
aaauggaggaauaugacgg

SEQ ID NO: 34284 - RNA, 19 nt, artificial
  Chemically synthesized
augcuuccugacaaucaac

SEQ ID NO: 34285 - RNA, 19 nt, artificial
  Chemically synthesized
auccagcuugccuccucuu

SEQ ID NO: 34286 - RNA, 19 nt, artificial
  Chemically synthesized
aauguagauauugugaagu

SEQ ID NO: 34287 - RNA, 19 nt, artificial
  Chemically synthesized
uuuuaacucaccucucaag

SEQ ID NO: 34288 - RNA, 19 nt, artificial
  Chemically synthesized
acaggguucaaaaugucug

SEQ ID NO: 34289 - RNA, 19 nt, artificial
  Chemically synthesized
cccauuuaacaggcaaguc

SEQ ID NO: 34290 - RNA, 19 nt, artificial
  Chemically synthesized
agcaagagagauguuuugg

SEQ ID NO: 34291 - RNA, 19 nt, artificial
  Chemically synthesized
ucucagacguuuuucggcu

SEQ ID NO: 34292 - RNA, 19 nt, artificial
  Chemically synthesized
guuacaggcaccgagaaug

SEQ ID NO: 34293 - RNA, 19 nt, artificial
  Chemically synthesized
aaguaagaagacaugaacc

SEQ ID NO: 34294 - RNA, 19 nt, artificial
  Chemically synthesized
uguucaaucuuaccagugc

SEQ ID NO: 34295 - RNA, 19 nt, artificial
  Chemically synthesized
agaacauagaacucugggc

SEQ ID NO: 34296 - RNA, 19 nt, artificial
  Chemically synthesized
uugacaccucagccucuac

SEQ ID NO: 34297 - RNA, 19 nt, artificial
  Chemically synthesized
uaagcucuaagagaagcac

SEQ ID NO: 34298 - RNA, 19 nt, artificial
  Chemically synthesized
uguauuuccagugcaauug

SEQ ID NO: 34299 - RNA, 19 nt, artificial
  Chemically synthesized
ucuuucagauacaugguug

SEQ ID NO: 34300 - RNA, 19 nt, artificial
  Chemically synthesized
uucugguugccuugguagg

SEQ ID NO: 34301 - RNA, 19 nt, artificial
  Chemically synthesized
aaugggaagacaccuaugg

SEQ ID NO: 34302 - RNA, 19 nt, artificial
  Chemically synthesized
aacuccgagagucuaccag

SEQ ID NO: 34303 - RNA, 19 nt, artificial
  Chemically synthesized
gaagacaugaaccaagugg

SEQ ID NO: 34304 - RNA, 19 nt, artificial
  Chemically synthesized
aaagaggcugaaagaggcc

SEQ ID NO: 34305 - RNA, 19 nt, artificial
  Chemically synthesized
uucuuacaugcauuugagg

SEQ ID NO: 34306 - RNA, 19 nt, artificial
  Chemically synthesized
uccaaaguauacuuccggg

SEQ ID NO: 34307 - RNA, 19 nt, artificial
  Chemically synthesized
uaacaggcaaguccaacuc

SEQ ID NO: 34308 - RNA, 19 nt, artificial
  Chemically synthesized
uccaccuacagaaggagcu

SEQ ID NO: 34309 - RNA, 19 nt, artificial
  Chemically synthesized
aagauuuugaaugcuuccu

SEQ ID NO: 34310 - RNA, 19 nt, artificial
  Chemically synthesized
agaagcaugaaaaagcagc

SEQ ID NO: 34311 - RNA, 19 nt, artificial
  Chemically synthesized
uuaucuguuaguuucaccg

SEQ ID NO: 34312 - RNA, 19 nt, artificial
  Chemically synthesized
uuuuuaagcacuauuagag

SEQ ID NO: 34313 - RNA, 19 nt, artificial
  Chemically synthesized
ucuuccgucauauuccucc

SEQ ID NO: 34314 - RNA, 19 nt, artificial
  Chemically synthesized
uuucauuucacaaaaaugc

SEQ ID NO: 34315 - RNA, 19 nt, artificial
  Chemically synthesized
uuagaagugaagaugcugc

SEQ ID NO: 34316 - RNA, 19 nt, artificial
  Chemically synthesized
uuuuacuucuucucagucc

SEQ ID NO: 34317 - RNA, 19 nt, artificial
  Chemically synthesized
uguucuuccgucauauucc

SEQ ID NO: 34318 - RNA, 19 nt, artificial
  Chemically synthesized
uaacaaagaaucauaaugg

SEQ ID NO: 34319 - RNA, 19 nt, artificial
  Chemically synthesized
uuaagcacuauuagaguug

SEQ ID NO: 34320 - RNA, 19 nt, artificial
  Chemically synthesized
uuauuaugcaagccucuag

SEQ ID NO: 34321 - RNA, 19 nt, artificial
  Chemically synthesized
uuaggaaugaaaugagucc

SEQ ID NO: 34322 - RNA, 19 nt, artificial
  Chemically synthesized
uuuucauuucacaaaaaug

SEQ ID NO: 34323 - RNA, 19 nt, artificial
  Chemically synthesized
uugcuuaucuguuaguuuc

SEQ ID NO: 34324 - RNA, 19 nt, artificial
  Chemically synthesized
auguucuuccgucauauuc

SEQ ID NO: 34325 - RNA, 19 nt, artificial
  Chemically synthesized
uguaucugaaagacagucc

SEQ ID NO: 34326 - RNA, 19 nt, artificial
  Chemically synthesized
uauuccuccauuugucugg

SEQ ID NO: 34327 - RNA, 19 nt, artificial
  Chemically synthesized
uaggaaugaaaugaguccc

SEQ ID NO: 34328 - RNA, 19 nt, artificial
  Chemically synthesized
uuacauguuuucauuucac

SEQ ID NO: 34329 - RNA, 19 nt, artificial
  Chemically synthesized
uaccaaggcaaccagaacc

SEQ ID NO: 34330 - RNA, 19 nt, artificial
  Chemically synthesized
uuucaaucugccuaaauac

SEQ ID NO: 34331 - RNA, 19 nt, artificial
  Chemically synthesized
uucaugcuucucccucuuc

SEQ ID NO: 34332 - RNA, 19 nt, artificial
  Chemically synthesized
uuaugcaagccucuagucu

SEQ ID NO: 34333 - RNA, 19 nt, artificial
  Chemically synthesized
aauaucuacauucucucuu

SEQ ID NO: 34334 - RNA, 19 nt, artificial
  Chemically synthesized
uuuuaagcacuauuagagu

SEQ ID NO: 34335 - RNA, 19 nt, artificial
  Chemically synthesized
uauauuauaggaaaacauc

SEQ ID NO: 34336 - RNA, 19 nt, artificial
  Chemically synthesized
uuauaggaaaacaucauua

SEQ ID NO: 34337 - RNA, 19 nt, artificial
  Chemically synthesized
uuuccuaauauguacuuca

SEQ ID NO: 34338 - RNA, 19 nt, artificial
  Chemically synthesized
ucauauuccuccauuuguc

SEQ ID NO: 34339 - RNA, 19 nt, artificial
  Chemically synthesized
auauaaaugaucagcacug

SEQ ID NO: 34340 - RNA, 19 nt, artificial
  Chemically synthesized
uagaacaccugguagcugc

SEQ ID NO: 34341 - RNA, 19 nt, artificial
  Chemically synthesized
ucauaauggaaagaauccc

SEQ ID NO: 34342 - RNA, 19 nt, artificial
  Chemically synthesized
ucuuauagaguuuccauag

SEQ ID NO: 34343 - RNA, 19 nt, artificial
  Chemically synthesized
augauuuuuaagcacuauu

SEQ ID NO: 34344 - RNA, 19 nt, artificial
  Chemically synthesized
acaauaucuacauucucuc

SEQ ID NO: 34345 - RNA, 19 nt, artificial
  Chemically synthesized
uauuaugcaagccucuagu

SEQ ID NO: 34346 - RNA, 19 nt, artificial
  Chemically synthesized
uucaaaaucuugaccaaau

SEQ ID NO: 34347 - RNA, 19 nt, artificial
  Chemically synthesized
auaaacauuaggugaguug

SEQ ID NO: 34348 - RNA, 19 nt, artificial
  Chemically synthesized
ucaugcuucucccucuuca

SEQ ID NO: 34349 - RNA, 19 nt, artificial
  Chemically synthesized
uauuacauguuuucauuuc

SEQ ID NO: 34350 - RNA, 19 nt, artificial
  Chemically synthesized
auguacuucacaauaucua

SEQ ID NO: 34351 - RNA, 19 nt, artificial
  Chemically synthesized
uucauuucacaaaaaugca

SEQ ID NO: 34352 - RNA, 19 nt, artificial
  Chemically synthesized
uagaagugaagaugcugcc

SEQ ID NO: 34353 - RNA, 19 nt, artificial
  Chemically synthesized
auauuauaggaaaacauca

SEQ ID NO: 34354 - RNA, 19 nt, artificial
  Chemically synthesized
uucaaucugccuaaauacu

SEQ ID NO: 34355 - RNA, 19 nt, artificial
  Chemically synthesized
uauccuaacauauacuuuu

SEQ ID NO: 34356 - RNA, 19 nt, artificial
  Chemically synthesized
uauguacuucacaauaucu

SEQ ID NO: 34357 - RNA, 19 nt, artificial
  Chemically synthesized
ucaaugauuuuuaagcacu

SEQ ID NO: 34358 - RNA, 19 nt, artificial
  Chemically synthesized
uacauucucucuuuaguca

SEQ ID NO: 34359 - RNA, 19 nt, artificial
  Chemically synthesized
ucauuaguagcugacaauc

SEQ ID NO: 34360 - RNA, 19 nt, artificial
  Chemically synthesized
uuauacuucacuccagaaa

SEQ ID NO: 34361 - RNA, 19 nt, artificial
  Chemically synthesized
auauggguaauugaagggc

SEQ ID NO: 34362 - RNA, 19 nt, artificial
  Chemically synthesized
uuuuccuaauauguacuuc

SEQ ID NO: 34363 - RNA, 19 nt, artificial
  Chemically synthesized
uaauauguacuucacaaua

SEQ ID NO: 34364 - RNA, 19 nt, artificial
  Chemically synthesized
ugauuuuuaagcacuauua

SEQ ID NO: 34365 - RNA, 19 nt, artificial
  Chemically synthesized
aauuccauaggugucuucc

SEQ ID NO: 34366 - RNA, 19 nt, artificial
  Chemically synthesized
uacuuuggaauauacaaag

SEQ ID NO: 34367 - RNA, 19 nt, artificial
  Chemically synthesized
uaggaaaacaucauuagua

SEQ ID NO: 34368 - RNA, 19 nt, artificial
  Chemically synthesized
uuuucaaucugccuaaaua

SEQ ID NO: 34369 - RNA, 19 nt, artificial
  Chemically synthesized
uaaauccucaggucacaac

SEQ ID NO: 34370 - RNA, 19 nt, artificial
  Chemically synthesized
aaauccucaggucacaacc

SEQ ID NO: 34371 - RNA, 19 nt, artificial
  Chemically synthesized
guaagauugaacacugccc

SEQ ID NO: 34372 - RNA, 19 nt, artificial
  Chemically synthesized
uuuaagcacuauuagaguu

SEQ ID NO: 34373 - RNA, 19 nt, artificial
  Chemically synthesized
uuuggaauauacaaaguac

SEQ ID NO: 34374 - RNA, 19 nt, artificial
  Chemically synthesized
uacauguuuucauuucaca

SEQ ID NO: 34375 - RNA, 19 nt, artificial
  Chemically synthesized
uauuauaggaaaacaucau

SEQ ID NO: 34376 - RNA, 19 nt, artificial
  Chemically synthesized
uaaaugaucagcacuggua

SEQ ID NO: 34377 - RNA, 19 nt, artificial
  Chemically synthesized
ugcuucuccaaagaugaug

SEQ ID NO: 34378 - RNA, 19 nt, artificial
  Chemically synthesized
ucacaauaucuacauucuc

SEQ ID NO: 34379 - RNA, 19 nt, artificial
  Chemically synthesized
uauuuuccuaauauguacu

SEQ ID NO: 34380 - RNA, 19 nt, artificial
  Chemically synthesized
aucuacauucucucuuuag

SEQ ID NO: 34381 - RNA, 19 nt, artificial
  Chemically synthesized
auuauaggaaaacaucauu

SEQ ID NO: 34382 - RNA, 19 nt, artificial
  Chemically synthesized
cuucacaauaucuacauuc

SEQ ID NO: 34383 - RNA, 19 nt, artificial
  Chemically synthesized
uuggaauauacaaaguaca

SEQ ID NO: 34384 - RNA, 19 nt, artificial
  Chemically synthesized
uuccuaauauguacuucac

SEQ ID NO: 34385 - RNA, 19 nt, artificial
  Chemically synthesized
auauuuuccuaauauguac

SEQ ID NO: 34386 - RNA, 19 nt, artificial
  Chemically synthesized
uucucuuagagcuuauaua

SEQ ID NO: 34387 - RNA, 19 nt, artificial
  Chemically synthesized
ugacauauaaaugaucagc

SEQ ID NO: 34388 - RNA, 19 nt, artificial
  Chemically synthesized
auacguugacauauaaaug

SEQ ID NO: 34389 - RNA, 19 nt, artificial
  Chemically synthesized
uucacaauaucuacauucu

SEQ ID NO: 34390 - RNA, 19 nt, artificial
  Chemically synthesized
uugguucaugucuucuuac

SEQ ID NO: 34391 - RNA, 19 nt, artificial
  Chemically synthesized
auauguacuucacaauauc

SEQ ID NO: 34392 - RNA, 19 nt, artificial
  Chemically synthesized
auuuuuaagcacuauuaga

SEQ ID NO: 34393 - RNA, 19 nt, artificial
  Chemically synthesized
auaggugucuucccauucc

SEQ ID NO: 34394 - RNA, 19 nt, artificial
  Chemically synthesized
uauuagaguugauugucag

SEQ ID NO: 34395 - RNA, 19 nt, artificial
  Chemically synthesized
uauaggaaaacaucauuag

SEQ ID NO: 34396 - RNA, 19 nt, artificial
  Chemically synthesized
auuccauaggugucuuccc

SEQ ID NO: 34397 - RNA, 19 nt, artificial
  Chemically synthesized
uauaaaugaucagcacugg

SEQ ID NO: 34398 - RNA, 19 nt, artificial
  Chemically synthesized
guaacaaagaaucauaaug

SEQ ID NO: 34399 - RNA, 19 nt, artificial
  Chemically synthesized
acuaagaugaguguagaac

SEQ ID NO: 34400 - RNA, 19 nt, artificial
  Chemically synthesized
uacuucacaauaucuacau

SEQ ID NO: 34401 - RNA, 19 nt, artificial
  Chemically synthesized
uaucuguuaguuucaccga

SEQ ID NO: 34402 - RNA, 19 nt, artificial
  Chemically synthesized
aucaaugauuuuuaagcac

SEQ ID NO: 34403 - RNA, 19 nt, artificial
  Chemically synthesized
auuacauguuuucauuuca

SEQ ID NO: 34404 - RNA, 19 nt, artificial
  Chemically synthesized
uacguugacauauaaauga

SEQ ID NO: 34405 - RNA, 19 nt, artificial
  Chemically synthesized
aauauacaaaguacagccc

SEQ ID NO: 34406 - RNA, 19 nt, artificial
  Chemically synthesized
auacuuagaguuccucaug

SEQ ID NO: 34407 - RNA, 19 nt, artificial
  Chemically synthesized
gaauacaacauucucggug

SEQ ID NO: 34408 - RNA, 19 nt, artificial
  Chemically synthesized
uauacuuuggaauauacaa

SEQ ID NO: 34409 - RNA, 19 nt, artificial
  Chemically synthesized
cuuuuuauuacauguuuuc

SEQ ID NO: 34410 - RNA, 19 nt, artificial
  Chemically synthesized
uaugcauuuagaagugaag

SEQ ID NO: 34411 - RNA, 19 nt, artificial
  Chemically synthesized
aaucauaauggaaagaauc

SEQ ID NO: 34412 - RNA, 19 nt, artificial
  Chemically synthesized
uugacauauaaaugaucag

SEQ ID NO: 34413 - RNA, 19 nt, artificial
  Chemically synthesized
agagagcucagauacguug

SEQ ID NO: 34414 - RNA, 19 nt, artificial
  Chemically synthesized
aaucugccuaaauacucuc

SEQ ID NO: 34415 - RNA, 19 nt, artificial
  Chemically synthesized
guacagcccaguuucauug

SEQ ID NO: 34416 - RNA, 19 nt, artificial
  Chemically synthesized
uaauugaagggcugcugca

SEQ ID NO: 34417 - RNA, 19 nt, artificial
  Chemically synthesized
gaauauacaaaguacagcc

SEQ ID NO: 34418 - RNA, 19 nt, artificial
  Chemically synthesized
auaauggaaagaaucccaa

SEQ ID NO: 34419 - RNA, 19 nt, artificial
  Chemically synthesized
guaauugaagggcugcugc

SEQ ID NO: 34420 - RNA, 19 nt, artificial
  Chemically synthesized
uccauagcuaagggaaaca

SEQ ID NO: 34421 - RNA, 19 nt, artificial
  Chemically synthesized
uaaacauuaggugaguuga

SEQ ID NO: 34422 - RNA, 19 nt, artificial
  Chemically synthesized
aagaaucccaaagugcuuc

SEQ ID NO: 34423 - RNA, 19 nt, artificial
  Chemically synthesized
auaucuacauucucucuuu

SEQ ID NO: 34424 - RNA, 19 nt, artificial
  Chemically synthesized
auccucaggucacaaccau

SEQ ID NO: 34425 - RNA, 19 nt, artificial
  Chemically synthesized
acuauuagaguugauuguc

SEQ ID NO: 34426 - RNA, 19 nt, artificial
  Chemically synthesized
caguagcucaucaucuucc

SEQ ID NO: 34427 - RNA, 19 nt, artificial
  Chemically synthesized
ucucuuagagcuuauauaa

SEQ ID NO: 34428 - RNA, 19 nt, artificial
  Chemically synthesized
ugauugucaggaagcauuc

SEQ ID NO: 34429 - RNA, 19 nt, artificial
  Chemically synthesized
caaucaaugauuuuuaagc

SEQ ID NO: 34430 - RNA, 19 nt, artificial
  Chemically synthesized
ugcugacugcucaagagga

SEQ ID NO: 34431 - RNA, 19 nt, artificial
  Chemically synthesized
guaucugaaagacaguccc

SEQ ID NO: 34432 - RNA, 19 nt, artificial
  Chemically synthesized
cucuuauagaguuuccaua

SEQ ID NO: 34433 - RNA, 19 nt, artificial
  Chemically synthesized
cuguuaguuucaccgaugg

SEQ ID NO: 34434 - RNA, 19 nt, artificial
  Chemically synthesized
ucuuuagcuuauuaugcaa

SEQ ID NO: 34435 - RNA, 19 nt, artificial
  Chemically synthesized
uagugcaguagcucaucau

SEQ ID NO: 34436 - RNA, 19 nt, artificial
  Chemically synthesized
aauacaacauucucggugc

SEQ ID NO: 34437 - RNA, 19 nt, artificial
  Chemically synthesized
auacuuuggaauauacaaa

SEQ ID NO: 34438 - RNA, 19 nt, artificial
  Chemically synthesized
auucaaaaucuugaccaaa

SEQ ID NO: 34439 - RNA, 19 nt, artificial
  Chemically synthesized
aacaucucucuugcuuauc

SEQ ID NO: 34440 - RNA, 19 nt, artificial
  Chemically synthesized
uggaaagaaucccaaagug

SEQ ID NO: 34441 - RNA, 19 nt, artificial
  Chemically synthesized
acuugguucaugucuucuu

SEQ ID NO: 34442 - RNA, 19 nt, artificial
  Chemically synthesized
caugucuucuuacuugacc

SEQ ID NO: 34443 - RNA, 19 nt, artificial
  Chemically synthesized
acauguuuucauuucacaa

SEQ ID NO: 34444 - RNA, 19 nt, artificial
  Chemically synthesized
agcuuauuaugcaagccuc

SEQ ID NO: 34445 - RNA, 19 nt, artificial
  Chemically synthesized
cucauaaacauuaggugag

SEQ ID NO: 34446 - RNA, 19 nt, artificial
  Chemically synthesized
accuugaguuggacuugcc

SEQ ID NO: 34447 - RNA, 19 nt, artificial
  Chemically synthesized
auccuaccaaggcaaccag

SEQ ID NO: 34448 - RNA, 19 nt, artificial
  Chemically synthesized
cuuuuucaugcuucucccu

SEQ ID NO: 34449 - RNA, 19 nt, artificial
  Chemically synthesized
ugacaaucaaugauuuuua

SEQ ID NO: 34450 - RNA, 19 nt, artificial
  Chemically synthesized
uuuccauagcuaagggaaa

SEQ ID NO: 34451 - RNA, 19 nt, artificial
  Chemically synthesized
cuuaaauccucaggucaca

SEQ ID NO: 34452 - RNA, 19 nt, artificial
  Chemically synthesized
aaagugcuucucuuagagc

SEQ ID NO: 34453 - RNA, 19 nt, artificial
  Chemically synthesized
ugaguuaaaagguguccuu

SEQ ID NO: 34454 - RNA, 19 nt, artificial
  Chemically synthesized
uucacuccagaaagcagga

SEQ ID NO: 34455 - RNA, 19 nt, artificial
  Chemically synthesized
ugaguugaggagcuacaga

SEQ ID NO: 34456 - RNA, 19 nt, artificial
  Chemically synthesized
cuuuuccaucccuuaaauc

SEQ ID NO: 34457 - RNA, 19 nt, artificial
  Chemically synthesized
cuugaccaaaugcaaccca

SEQ ID NO: 34458 - RNA, 19 nt, artificial
  Chemically synthesized
agcaaacgguuuuacuucu

SEQ ID NO: 34459 - RNA, 19 nt, artificial
  Chemically synthesized
acuugccuguuaaaugggc

SEQ ID NO: 34460 - RNA, 19 nt, artificial
  Chemically synthesized
guucaugucuucuuacuug

SEQ ID NO: 34461 - RNA, 19 nt, artificial
  Chemically synthesized
cuucuucucaguccuguag

SEQ ID NO: 34462 - RNA, 19 nt, artificial
  Chemically synthesized
uaucuacauucucucuuua

SEQ ID NO: 34463 - RNA, 19 nt, artificial
  Chemically synthesized
aaaugcauguaagaagacc

SEQ ID NO: 34464 - RNA, 19 nt, artificial
  Chemically synthesized
auguuuucauuucacaaaa

SEQ ID NO: 34465 - RNA, 19 nt, artificial
  Chemically synthesized
caaaacaucucucuugcuu

SEQ ID NO: 34466 - RNA, 19 nt, artificial
  Chemically synthesized
guguuaggaaugaaaugag

SEQ ID NO: 34467 - RNA, 19 nt, artificial
  Chemically synthesized
uguaacaaagaaucauaau

SEQ ID NO: 34468 - RNA, 19 nt, artificial
  Chemically synthesized
uccuaacauauacuuuuua

SEQ ID NO: 34469 - RNA, 19 nt, artificial
  Chemically synthesized
aauauguacuucacaauau

SEQ ID NO: 34470 - RNA, 19 nt, artificial
  Chemically synthesized
auuuuccuaauauguacuu

SEQ ID NO: 34471 - RNA, 19 nt, artificial
  Chemically synthesized
aggacaauuccauaggugu

SEQ ID NO: 34472 - RNA, 19 nt, artificial
  Chemically synthesized
cauuuagaagugaagaugc

SEQ ID NO: 34473 - RNA, 19 nt, artificial
  Chemically synthesized
ugagauuccucaaaauuga

SEQ ID NO: 34474 - RNA, 19 nt, artificial
  Chemically synthesized
acuuuccucagcuccuuuu

SEQ ID NO: 34475 - RNA, 19 nt, artificial
  Chemically synthesized
gaaaacaucauuaguagcu

SEQ ID NO: 34476 - RNA, 19 nt, artificial
  Chemically synthesized
aggaaaacaucauuaguag

SEQ ID NO: 34477 - RNA, 19 nt, artificial
  Chemically synthesized
aauccucaggucacaacca

SEQ ID NO: 34478 - RNA, 19 nt, artificial
  Chemically synthesized
cucaaaauugaccagagag

SEQ ID NO: 34479 - RNA, 19 nt, artificial
  Chemically synthesized
augcacaucuacauaaaua

SEQ ID NO: 34480 - RNA, 19 nt, artificial
  Chemically synthesized
aggugucuucccauuccag

SEQ ID NO: 34481 - RNA, 19 nt, artificial
  Chemically synthesized
aguguagaacaccugguag

SEQ ID NO: 34482 - RNA, 19 nt, artificial
  Chemically synthesized
ccauauuuuccuaauaugu

SEQ ID NO: 34483 - RNA, 19 nt, artificial
  Chemically synthesized
agaggcauggaccuugagu

SEQ ID NO: 34484 - RNA, 19 nt, artificial
  Chemically synthesized
aaucaaugauuuuuaagca

SEQ ID NO: 34485 - RNA, 19 nt, artificial
  Chemically synthesized
caaagaaucauaauggaaa

SEQ ID NO: 34486 - RNA, 19 nt, artificial
  Chemically synthesized
aagcauucaaaaucuugac

SEQ ID NO: 34487 - RNA, 19 nt, artificial
  Chemically synthesized
ccagaaagcaggacaauuc

SEQ ID NO: 34488 - RNA, 19 nt, artificial
  Chemically synthesized
aagguguccuuuucaaucu

SEQ ID NO: 34489 - RNA, 19 nt, artificial
  Chemically synthesized
ugcacaucuacauaaauau

SEQ ID NO: 34490 - RNA, 19 nt, artificial
  Chemically synthesized
auaggaaaacaucauuagu

SEQ ID NO: 34491 - RNA, 19 nt, artificial
  Chemically synthesized
aguauacuuuggaauauac

SEQ ID NO: 34492 - RNA, 19 nt, artificial
  Chemically synthesized
cacugaauacaacauucuc

SEQ ID NO: 34493 - RNA, 19 nt, artificial
  Chemically synthesized
acaaucaaugauuuuuaag

SEQ ID NO: 34494 - RNA, 19 nt, artificial
  Chemically synthesized
acaucugcccaguagugca

SEQ ID NO: 34495 - RNA, 19 nt, artificial
  Chemically synthesized
guggucucaagguccacuu

SEQ ID NO: 34496 - RNA, 19 nt, artificial
  Chemically synthesized
acauuuugaacccuguggu

SEQ ID NO: 34497 - RNA, 19 nt, artificial
  Chemically synthesized
gguaauugaagggcugcug

SEQ ID NO: 34498 - RNA, 19 nt, artificial
  Chemically synthesized
ucaugucuucuuacuugac

SEQ ID NO: 34499 - RNA, 19 nt, artificial
  Chemically synthesized
uccuaccaaggcaaccaga

SEQ ID NO: 34500 - RNA, 19 nt, artificial
  Chemically synthesized
ccucauguagaccuugugg

SEQ ID NO: 34501 - RNA, 19 nt, artificial
  Chemically synthesized
uggucucaagguccacuug

SEQ ID NO: 34502 - RNA, 19 nt, artificial
  Chemically synthesized
cuucuguagguggaagagc

SEQ ID NO: 34503 - RNA, 19 nt, artificial
  Chemically synthesized
ugcaguagcucaucaucuu

SEQ ID NO: 34504 - RNA, 19 nt, artificial
  Chemically synthesized
cuugcuuaucuguuaguuu

SEQ ID NO: 34505 - RNA, 19 nt, artificial
  Chemically synthesized
gaguugaggagcuacagac

SEQ ID NO: 34506 - RNA, 19 nt, artificial
  Chemically synthesized
uguagaggcugagguguca

SEQ ID NO: 34507 - RNA, 19 nt, artificial
  Chemically synthesized
acaaagaaucauaauggaa

SEQ ID NO: 34508 - RNA, 19 nt, artificial
  Chemically synthesized
acaaaguacagcccaguuu

SEQ ID NO: 34509 - RNA, 19 nt, artificial
  Chemically synthesized
ucacaaccauguaucugaa

SEQ ID NO: 34510 - RNA, 19 nt, artificial
  Chemically synthesized
ccuaauauguacuucacaa

SEQ ID NO: 34511 - RNA, 19 nt, artificial
  Chemically synthesized
auccuaacauauacuuuuu

SEQ ID NO: 34512 - RNA, 19 nt, artificial
  Chemically synthesized
cucuuuagcuuauuaugca

SEQ ID NO: 34513 - RNA, 19 nt, artificial
  Chemically synthesized
cagaaagcaggacaauucc

SEQ ID NO: 34514 - RNA, 19 nt, artificial
  Chemically synthesized
ccaaaugcaacccauauuu

SEQ ID NO: 34515 - RNA, 19 nt, artificial
  Chemically synthesized
gucuucuuacuugaccuca

SEQ ID NO: 34516 - RNA, 19 nt, artificial
  Chemically synthesized
guagacucucggaguucug

SEQ ID NO: 34517 - RNA, 19 nt, artificial
  Chemically synthesized
aauugaagggcugcugcau

SEQ ID NO: 34518 - RNA, 19 nt, artificial
  Chemically synthesized
cuaauauguacuucacaau

SEQ ID NO: 34519 - RNA, 19 nt, artificial
  Chemically synthesized
cauuaggugaguugaggag

SEQ ID NO: 34520 - RNA, 19 nt, artificial
  Chemically synthesized
ugaauacaacauucucggu

SEQ ID NO: 34521 - RNA, 19 nt, artificial
  Chemically synthesized
ucauaaacauuaggugagu

SEQ ID NO: 34522 - RNA, 19 nt, artificial
  Chemically synthesized
guuaaaagguguccuuuuc

SEQ ID NO: 34523 - RNA, 19 nt, artificial
  Chemically synthesized
uacagcccaguuucauuga

SEQ ID NO: 34524 - RNA, 19 nt, artificial
  Chemically synthesized
cuguugcugacugcucaag

SEQ ID NO: 34525 - RNA, 19 nt, artificial
  Chemically synthesized
caucucucuugcuuaucug

SEQ ID NO: 34526 - RNA, 19 nt, artificial
  Chemically synthesized
uaauggaaagaaucccaaa

SEQ ID NO: 34527 - RNA, 19 nt, artificial
  Chemically synthesized
ugcauuuagaagugaagau

SEQ ID NO: 34528 - RNA, 19 nt, artificial
  Chemically synthesized
ccuugaguuggacuugccu

SEQ ID NO: 34529 - RNA, 19 nt, artificial
  Chemically synthesized
gucuuccuuuuccaucccu

SEQ ID NO: 34530 - RNA, 19 nt, artificial
  Chemically synthesized
aaaucuugaccaaaugcaa

SEQ ID NO: 34531 - RNA, 19 nt, artificial
  Chemically synthesized
caggacaauuccauaggug

SEQ ID NO: 34532 - RNA, 19 nt, artificial
  Chemically synthesized
acagggaagaacugugccu

SEQ ID NO: 34533 - RNA, 19 nt, artificial
  Chemically synthesized
guugacauauaaaugauca

SEQ ID NO: 34534 - RNA, 19 nt, artificial
  Chemically synthesized
aguuaaaagguguccuuuu

SEQ ID NO: 34535 - RNA, 19 nt, artificial
  Chemically synthesized
gauuuuuaagcacuauuag

SEQ ID NO: 34536 - RNA, 19 nt, artificial
  Chemically synthesized
ucucaggcacuaagaugag

SEQ ID NO: 34537 - RNA, 19 nt, artificial
  Chemically synthesized
ugcaacccauauuuuccua

SEQ ID NO: 34538 - RNA, 19 nt, artificial
  Chemically synthesized
cauauuccuccauuugucu

SEQ ID NO: 34539 - RNA, 19 nt, artificial
  Chemically synthesized
gcauucaaaaucuugacca

SEQ ID NO: 34540 - RNA, 19 nt, artificial
  Chemically synthesized
cuuucagccucuuuagcuu

SEQ ID NO: 34541 - RNA, 19 nt, artificial
  Chemically synthesized
aucugcccaguagugcagu

SEQ ID NO: 34542 - RNA, 19 nt, artificial
  Chemically synthesized
gguaagauugaacacugcc

SEQ ID NO: 34543 - RNA, 19 nt, artificial
  Chemically synthesized
aaaaaugcacaucuacaua

SEQ ID NO: 34544 - RNA, 19 nt, artificial
  Chemically synthesized
cacaucuacauaaauauuu

SEQ ID NO: 34545 - RNA, 19 nt, artificial
  Chemically synthesized
guucuuccgucauauuccu

SEQ ID NO: 34546 - RNA, 19 nt, artificial
  Chemically synthesized
gugaguugaggagcuacag

SEQ ID NO: 34547 - RNA, 19 nt, artificial
  Chemically synthesized
cccuuaaauccucagguca

SEQ ID NO: 34548 - RNA, 19 nt, artificial
  Chemically synthesized
aaaaugcacaucuacauaa

SEQ ID NO: 34549 - RNA, 19 nt, artificial
  Chemically synthesized
cagcccaguuucauugauc

SEQ ID NO: 34550 - RNA, 19 nt, artificial
  Chemically synthesized
guguagaacaccugguagc

SEQ ID NO: 34551 - RNA, 19 nt, artificial
  Chemically synthesized
ggucacaaccauguaucug

SEQ ID NO: 34552 - RNA, 19 nt, artificial
  Chemically synthesized
auaugcauuuagaagugaa

SEQ ID NO: 34553 - RNA, 19 nt, artificial
  Chemically synthesized
agaguuccucauguagacc

SEQ ID NO: 34554 - RNA, 19 nt, artificial
  Chemically synthesized
cauauuuuccuaauaugua

SEQ ID NO: 34555 - RNA, 19 nt, artificial
  Chemically synthesized
cuguagguggaagagcuga

SEQ ID NO: 34556 - RNA, 19 nt, artificial
  Chemically synthesized
agcucagauacguugacau

SEQ ID NO: 34557 - RNA, 19 nt, artificial
  Chemically synthesized
agcccaguuucauugauca

SEQ ID NO: 34558 - RNA, 19 nt, artificial
  Chemically synthesized
caaaguacagcccaguuuc

SEQ ID NO: 34559 - RNA, 19 nt, artificial
  Chemically synthesized
cucucuuauagaguuucca

SEQ ID NO: 34560 - RNA, 19 nt, artificial
  Chemically synthesized
aaagcaggacaauuccaua

SEQ ID NO: 34561 - RNA, 19 nt, artificial
  Chemically synthesized
cacaaaaaugcacaucuac

SEQ ID NO: 34562 - RNA, 19 nt, artificial
  Chemically synthesized
gaaagcaggacaauuccau

SEQ ID NO: 34563 - RNA, 19 nt, artificial
  Chemically synthesized
aaccauguaucugaaagac

SEQ ID NO: 34564 - RNA, 19 nt, artificial
  Chemically synthesized
agaaucauaauggaaagaa

SEQ ID NO: 34565 - RNA, 19 nt, artificial
  Chemically synthesized
ccucacugaauacaacauu

SEQ ID NO: 34566 - RNA, 19 nt, artificial
  Chemically synthesized
guauacuuuggaauauaca

SEQ ID NO: 34567 - RNA, 19 nt, artificial
  Chemically synthesized
acaucauuaguagcugaca

SEQ ID NO: 34568 - RNA, 19 nt, artificial
  Chemically synthesized
caaucugccuaaauacucu

SEQ ID NO: 34569 - RNA, 19 nt, artificial
  Chemically synthesized
agaaagcaggacaauucca

SEQ ID NO: 34570 - RNA, 19 nt, artificial
  Chemically synthesized
ucacuccagaaagcaggac

SEQ ID NO: 34571 - RNA, 19 nt, artificial
  Chemically synthesized
aggcauggaccuugaguug

SEQ ID NO: 34572 - RNA, 19 nt, artificial
  Chemically synthesized
aaaagguguccuuuucaau

SEQ ID NO: 34573 - RNA, 19 nt, artificial
  Chemically synthesized
ggauacuuagaguuccuca

SEQ ID NO: 34574 - RNA, 19 nt, artificial
  Chemically synthesized
agugcuucucuuagagcuu

SEQ ID NO: 34575 - RNA, 19 nt, artificial
  Chemically synthesized
aaugauuuuuaagcacuau

SEQ ID NO: 34576 - RNA, 19 nt, artificial
  Chemically synthesized
aagacccucacugaauaca

SEQ ID NO: 34577 - RNA, 19 nt, artificial
  Chemically synthesized
aauugaccagagagagcuc

SEQ ID NO: 34578 - RNA, 19 nt, artificial
  Chemically synthesized
ugcuucucuuagagcuuau

SEQ ID NO: 34579 - RNA, 19 nt, artificial
  Chemically synthesized
ugaacccuguggucucaag

SEQ ID NO: 34580 - RNA, 19 nt, artificial
  Chemically synthesized
cauguaagaagacccucac

SEQ ID NO: 34581 - RNA, 19 nt, artificial
  Chemically synthesized
ggaauauacaaaguacagc

SEQ ID NO: 34582 - RNA, 19 nt, artificial
  Chemically synthesized
cuuauacuucacuccagaa

SEQ ID NO: 34583 - RNA, 19 nt, artificial
  Chemically synthesized
aaagaaucauaauggaaag

SEQ ID NO: 34584 - RNA, 19 nt, artificial
  Chemically synthesized
ucuucucaguccuguagag

SEQ ID NO: 34585 - RNA, 19 nt, artificial
  Chemically synthesized
cccauauuuuccuaauaug

SEQ ID NO: 34586 - RNA, 19 nt, artificial
  Chemically synthesized
uaggugaguugaggagcua

SEQ ID NO: 34587 - RNA, 19 nt, artificial
  Chemically synthesized
acccauauuuuccuaauau

SEQ ID NO: 34588 - RNA, 19 nt, artificial
  Chemically synthesized
cugacaaucaaugauuuuu

SEQ ID NO: 34589 - RNA, 19 nt, artificial
  Chemically synthesized
ccagcaaacgguuuuacuu

SEQ ID NO: 34590 - RNA, 19 nt, artificial
  Chemically synthesized
gacaauuccauaggugucu

SEQ ID NO: 34591 - RNA, 19 nt, artificial
  Chemically synthesized
aagccgaaaaacgucugag

SEQ ID NO: 34592 - RNA, 19 nt, artificial
  Chemically synthesized
cauuaguagcugacaauca

SEQ ID NO: 34593 - RNA, 19 nt, artificial
  Chemically synthesized
gaguuccucauguagaccu

SEQ ID NO: 34594 - RNA, 19 nt, artificial
  Chemically synthesized
gacauauaaaugaucagca

SEQ ID NO: 34595 - RNA, 19 nt, artificial
  Chemically synthesized
guugcugacugcucaagag

SEQ ID NO: 34596 - RNA, 19 nt, artificial
  Chemically synthesized
ucacaaaaaugcacaucua

SEQ ID NO: 34597 - RNA, 19 nt, artificial
  Chemically synthesized
aaaugaucagcacugguaa

SEQ ID NO: 34598 - RNA, 19 nt, artificial
  Chemically synthesized
agguccacuugguucaugu

SEQ ID NO: 34599 - RNA, 19 nt, artificial
  Chemically synthesized
agguguccuuuucaaucug

SEQ ID NO: 34600 - RNA, 19 nt, artificial
  Chemically synthesized
cacuccagaaagcaggaca

SEQ ID NO: 34601 - RNA, 19 nt, artificial
  Chemically synthesized
gaguucuauguucuuccgu

SEQ ID NO: 34602 - RNA, 19 nt, artificial
  Chemically synthesized
gccucuuucagccucuuua

SEQ ID NO: 34603 - RNA, 19 nt, artificial
  Chemically synthesized
caaagugcuucucuuagag

SEQ ID NO: 34604 - RNA, 19 nt, artificial
  Chemically synthesized
aagguccacuugguucaug

SEQ ID NO: 34605 - RNA, 19 nt, artificial
  Chemically synthesized
acagagguuggacagggaa

SEQ ID NO: 34606 - RNA, 19 nt, artificial
  Chemically synthesized
cauguuuucauuucacaaa

SEQ ID NO: 34607 - RNA, 19 nt, artificial
  Chemically synthesized
ugaccucaaaugcauguaa

SEQ ID NO: 34608 - RNA, 19 nt, artificial
  Chemically synthesized
uagaguugauugucaggaa

SEQ ID NO: 34609 - RNA, 19 nt, artificial
  Chemically synthesized
acauucucggugccuguaa

SEQ ID NO: 34610 - RNA, 19 nt, artificial
  Chemically synthesized
cuggaucucucuuauagag

SEQ ID NO: 34611 - RNA, 19 nt, artificial
  Chemically synthesized
ccuaaauacucucaggcac

SEQ ID NO: 34612 - RNA, 19 nt, artificial
  Chemically synthesized
agagagagcucagauacgu

SEQ ID NO: 34613 - RNA, 19 nt, artificial
  Chemically synthesized
aacaaagaaucauaaugga

SEQ ID NO: 34614 - RNA, 19 nt, artificial
  Chemically synthesized
ugcuguccacccaguagau

SEQ ID NO: 34615 - RNA, 19 nt, artificial
  Chemically synthesized
caaaauugaccagagagag

SEQ ID NO: 34616 - RNA, 19 nt, artificial
  Chemically synthesized
ccaucaucaccagauccug

SEQ ID NO: 34617 - RNA, 19 nt, artificial
  Chemically synthesized
agguuguugcaagauugac

SEQ ID NO: 34618 - RNA, 19 nt, artificial
  Chemically synthesized
gcauuuagaagugaagaug

SEQ ID NO: 34619 - RNA, 19 nt, artificial
  Chemically synthesized
acauauaaaugaucagcac

SEQ ID NO: 34620 - RNA, 19 nt, artificial
  Chemically synthesized
guuuccauagcuaagggaa

SEQ ID NO: 34621 - RNA, 19 nt, artificial
  Chemically synthesized
ccaguuucauugaucacaa

SEQ ID NO: 34622 - RNA, 19 nt, artificial
  Chemically synthesized
aguuggacuugccuguuaa

SEQ ID NO: 34623 - RNA, 19 nt, artificial
  Chemically synthesized
caaaaaugcacaucuacau

SEQ ID NO: 34624 - RNA, 19 nt, artificial
  Chemically synthesized
aguugaggagcuacagaca

SEQ ID NO: 34625 - RNA, 19 nt, artificial
  Chemically synthesized
ggaagagcugaaacauccc

SEQ ID NO: 34626 - RNA, 19 nt, artificial
  Chemically synthesized
ugaccagagagagcucaga

SEQ ID NO: 34627 - RNA, 19 nt, artificial
  Chemically synthesized
cacuugguucaugucuucu

SEQ ID NO: 34628 - RNA, 19 nt, artificial
  Chemically synthesized
aaguauacuuuggaauaua

SEQ ID NO: 34629 - RNA, 19 nt, artificial
  Chemically synthesized
guuggacagggaagaacug

SEQ ID NO: 34630 - RNA, 19 nt, artificial
  Chemically synthesized
cucucuugcuuaucuguua

SEQ ID NO: 34631 - RNA, 19 nt, artificial
  Chemically synthesized
agauacguugacauauaaa

SEQ ID NO: 34632 - RNA, 19 nt, artificial
  Chemically synthesized
aguuuccauagcuaaggga

SEQ ID NO: 34633 - RNA, 19 nt, artificial
  Chemically synthesized
gaccuugaguuggacuugc

SEQ ID NO: 34634 - RNA, 19 nt, artificial
  Chemically synthesized
ccugguagcugcuuuuuca

SEQ ID NO: 34635 - RNA, 19 nt, artificial
  Chemically synthesized
cagcuccuuuuuuucaggg

SEQ ID NO: 34636 - RNA, 19 nt, artificial
  Chemically synthesized
cgaaaaacgucugagauuc

SEQ ID NO: 34637 - RNA, 19 nt, artificial
  Chemically synthesized
gcuucuccaaagaugaugc

SEQ ID NO: 34638 - RNA, 19 nt, artificial
  Chemically synthesized
cuacagacauuuugaaccc

SEQ ID NO: 34639 - RNA, 19 nt, artificial
  Chemically synthesized
ggugaguugaggagcuaca

SEQ ID NO: 34640 - RNA, 19 nt, artificial
  Chemically synthesized
cccagcaaacgguuuuacu

SEQ ID NO: 34641 - RNA, 19 nt, artificial
  Chemically synthesized
ugaucagcacugguaagau

SEQ ID NO: 34642 - RNA, 19 nt, artificial
  Chemically synthesized
agccucuuuagcuuauuau

SEQ ID NO: 34643 - RNA, 19 nt, artificial
  Chemically synthesized
auuucacaaaaaugcacau

SEQ ID NO: 34644 - RNA, 19 nt, artificial
  Chemically synthesized
caauaucuacauucucucu

SEQ ID NO: 34645 - RNA, 19 nt, artificial
  Chemically synthesized
gaggcauggaccuugaguu

SEQ ID NO: 34646 - RNA, 19 nt, artificial
  Chemically synthesized
agacccucacugaauacaa

SEQ ID NO: 34647 - RNA, 19 nt, artificial
  Chemically synthesized
ggcucauaaacauuaggug

SEQ ID NO: 34648 - RNA, 19 nt, artificial
  Chemically synthesized
cauguaucugaaagacagu

SEQ ID NO: 34649 - RNA, 19 nt, artificial
  Chemically synthesized
gauacguugacauauaaau

SEQ ID NO: 34650 - RNA, 19 nt, artificial
  Chemically synthesized
ccaguagugcaguagcuca

SEQ ID NO: 34651 - RNA, 19 nt, artificial
  Chemically synthesized
gcaguagcucaucaucuuc

SEQ ID NO: 34652 - RNA, 19 nt, artificial
  Chemically synthesized
cucaggauaugcauuuaga

SEQ ID NO: 34653 - RNA, 19 nt, artificial
  Chemically synthesized
guaagaagacccucacuga

SEQ ID NO: 34654 - RNA, 19 nt, artificial
  Chemically synthesized
ggugucuucccauuccaga

SEQ ID NO: 34655 - RNA, 19 nt, artificial
  Chemically synthesized
cuuuggaauauacaaagua

SEQ ID NO: 34656 - RNA, 19 nt, artificial
  Chemically synthesized
guagaacaccugguagcug

SEQ ID NO: 34657 - RNA, 19 nt, artificial
  Chemically synthesized
acaauuccauaggugucuu

SEQ ID NO: 34658 - RNA, 19 nt, artificial
  Chemically synthesized
aacauucucggugccugua

SEQ ID NO: 34659 - RNA, 19 nt, artificial
  Chemically synthesized
gggauacuuagaguuccuc

SEQ ID NO: 34660 - RNA, 19 nt, artificial
  Chemically synthesized
cagaaccaugaaaaacauc

SEQ ID NO: 34661 - RNA, 19 nt, artificial
  Chemically synthesized
cuccaaagaugaugcugug

SEQ ID NO: 34662 - RNA, 19 nt, artificial
  Chemically synthesized
cuuuucaaucugccuaaau

SEQ ID NO: 34663 - RNA, 19 nt, artificial
  Chemically synthesized
aaacaucauuaguagcuga

SEQ ID NO: 34664 - RNA, 19 nt, artificial
  Chemically synthesized
cguugacauauaaaugauc

SEQ ID NO: 34665 - RNA, 19 nt, artificial
  Chemically synthesized
caguagugcaguagcucau

SEQ ID NO: 34666 - RNA, 19 nt, artificial
  Chemically synthesized
cacuuuccucagcuccuuu

SEQ ID NO: 34667 - RNA, 19 nt, artificial
  Chemically synthesized
cuguaacaaagaaucauaa

SEQ ID NO: 34668 - RNA, 19 nt, artificial
  Chemically synthesized
ccauagcuaagggaaacac

SEQ ID NO: 34669 - RNA, 19 nt, artificial
  Chemically synthesized
gcuuauuaugcaagccucu

SEQ ID NO: 34670 - RNA, 19 nt, artificial
  Chemically synthesized
cuaccaaggcaaccagaac

SEQ ID NO: 34671 - RNA, 19 nt, artificial
  Chemically synthesized
gcucaggauaugcauuuag

SEQ ID NO: 34672 - RNA, 19 nt, artificial
  Chemically synthesized
cugguagcugcuuuuucau

SEQ ID NO: 34673 - RNA, 19 nt, artificial
  Chemically synthesized
guagugcaguagcucauca

SEQ ID NO: 34674 - RNA, 19 nt, artificial
  Chemically synthesized
ccacccuucuuauacuuca

SEQ ID NO: 34675 - RNA, 19 nt, artificial
  Chemically synthesized
caucauuaguagcugacaa

SEQ ID NO: 34676 - RNA, 19 nt, artificial
  Chemically synthesized
gcaaacgguuuuacuucuu

SEQ ID NO: 34677 - RNA, 19 nt, artificial
  Chemically synthesized
agguggaagagcugaaaca

SEQ ID NO: 34678 - RNA, 19 nt, artificial
  Chemically synthesized
caauccuaccaaggcaacc

SEQ ID NO: 34679 - RNA, 19 nt, artificial
  Chemically synthesized
ccaucccuuaaauccucag

SEQ ID NO: 34680 - RNA, 19 nt, artificial
  Chemically synthesized
ggugaguuaaaaggugucc

SEQ ID NO: 34681 - RNA, 19 nt, artificial
  Chemically synthesized
caauuccauaggugucuuc

SEQ ID NO: 34682 - RNA, 19 nt, artificial
  Chemically synthesized
ucagccucuuuagcuuauu

SEQ ID NO: 34683 - RNA, 19 nt, artificial
  Chemically synthesized
ucaguccuguagaggcuga

SEQ ID NO: 34684 - RNA, 19 nt, artificial
  Chemically synthesized
cauuuugaacccugugguc

SEQ ID NO: 34685 - RNA, 19 nt, artificial
  Chemically synthesized
uacucucaggcacuaagau

SEQ ID NO: 34686 - RNA, 19 nt, artificial
  Chemically synthesized
cagagagagcucagauacg

SEQ ID NO: 34687 - RNA, 19 nt, artificial
  Chemically synthesized
acuuagaguuccucaugua

SEQ ID NO: 34688 - RNA, 19 nt, artificial
  Chemically synthesized
ggacaauuccauagguguc

SEQ ID NO: 34689 - RNA, 19 nt, artificial
  Chemically synthesized
agccucuagucuuccuuuu

SEQ ID NO: 34690 - RNA, 19 nt, artificial
  Chemically synthesized
gguguccuuuucaaucugc

SEQ ID NO: 34691 - RNA, 19 nt, artificial
  Chemically synthesized
aacccuguggucucaaggu

SEQ ID NO: 34692 - RNA, 19 nt, artificial
  Chemically synthesized
ccucagcuccuuuuuuuca

SEQ ID NO: 34693 - RNA, 19 nt, artificial
  Chemically synthesized
gauacuuagaguuccucau

SEQ ID NO: 34694 - RNA, 19 nt, artificial
  Chemically synthesized
aacgucugagauuccucaa

SEQ ID NO: 34695 - RNA, 19 nt, artificial
  Chemically synthesized
agaaucccaaagugcuucu

SEQ ID NO: 34696 - RNA, 19 nt, artificial
  Chemically synthesized
ccucuuucagccucuuuag

SEQ ID NO: 34697 - RNA, 19 nt, artificial
  Chemically synthesized
cugccuaaauacucucagg

SEQ ID NO: 34698 - RNA, 19 nt, artificial
  Chemically synthesized
caaugauuuuuaagcacua

SEQ ID NO: 34699 - RNA, 19 nt, artificial
  Chemically synthesized
cucaggucacaaccaugua

SEQ ID NO: 34700 - RNA, 19 nt, artificial
  Chemically synthesized
uguuuucauuucacaaaaa

SEQ ID NO: 34701 - RNA, 19 nt, artificial
  Chemically synthesized
guuuucauuucacaaaaau

SEQ ID NO: 34702 - RNA, 19 nt, artificial
  Chemically synthesized
ggacuugccuguuaaaugg

SEQ ID NO: 34703 - RNA, 19 nt, artificial
  Chemically synthesized
gccucuuuagcuuauuaug

SEQ ID NO: 34704 - RNA, 19 nt, artificial
  Chemically synthesized
agaguugauugucaggaag

SEQ ID NO: 34705 - RNA, 19 nt, artificial
  Chemically synthesized
cucuugcuuaucuguuagu

SEQ ID NO: 34706 - RNA, 19 nt, artificial
  Chemically synthesized
guugaggagcuacagacau

SEQ ID NO: 34707 - RNA, 19 nt, artificial
  Chemically synthesized
ggaaagaaucccaaagugc

SEQ ID NO: 34708 - RNA, 19 nt, artificial
  Chemically synthesized
aguagcugacaaucaauga

SEQ ID NO: 34709 - RNA, 19 nt, artificial
  Chemically synthesized
gcagguuguugcaagauug

SEQ ID NO: 34710 - RNA, 19 nt, artificial
  Chemically synthesized
ucugcccaguagugcagua

SEQ ID NO: 34711 - RNA, 19 nt, artificial
  Chemically synthesized
ccuaacauauacuuuuuau

SEQ ID NO: 34712 - RNA, 19 nt, artificial
  Chemically synthesized
cuccuucuguagguggaag

SEQ ID NO: 34713 - RNA, 19 nt, artificial
  Chemically synthesized
caacauucucggugccugu

SEQ ID NO: 34714 - RNA, 19 nt, artificial
  Chemically synthesized
gaccaaaugcaacccauau

SEQ ID NO: 34715 - RNA, 19 nt, artificial
  Chemically synthesized
aaaguacagcccaguuuca

SEQ ID NO: 34716 - RNA, 19 nt, artificial
  Chemically synthesized
cuucccauuccagaggcau

SEQ ID NO: 34717 - RNA, 19 nt, artificial
  Chemically synthesized
gccucuagucuuccuuuuc

SEQ ID NO: 34718 - RNA, 19 nt, artificial
  Chemically synthesized
aaaacaucacaaggagaca

SEQ ID NO: 34719 - RNA, 19 nt, artificial
  Chemically synthesized
aaugaucagcacugguaag

SEQ ID NO: 34720 - RNA, 19 nt, artificial
  Chemically synthesized
gaguugauugucaggaagc

SEQ ID NO: 34721 - RNA, 19 nt, artificial
  Chemically synthesized
cccuccaucaucaccagau

SEQ ID NO: 34722 - RNA, 19 nt, artificial
  Chemically synthesized
cccaauccuaccaaggcaa

SEQ ID NO: 34723 - RNA, 19 nt, artificial
  Chemically synthesized
cuauuugcuucuccaaaga

SEQ ID NO: 34724 - RNA, 19 nt, artificial
  Chemically synthesized
ccagagagagcucagauac

SEQ ID NO: 34725 - RNA, 19 nt, artificial
  Chemically synthesized
gcuuaucuguuaguuucac

SEQ ID NO: 34726 - RNA, 19 nt, artificial
  Chemically synthesized
ucggugccuguaacaaaga

SEQ ID NO: 34727 - RNA, 19 nt, artificial
  Chemically synthesized
cacccuucuuauacuucac

SEQ ID NO: 34728 - RNA, 19 nt, artificial
  Chemically synthesized
gaguuaaaagguguccuuu

SEQ ID NO: 34729 - RNA, 19 nt, artificial
  Chemically synthesized
acuccagaaagcaggacaa

SEQ ID NO: 34730 - RNA, 19 nt, artificial
  Chemically synthesized
aaauacucucaggcacuaa

SEQ ID NO: 34731 - RNA, 19 nt, artificial
  Chemically synthesized
aagaaucauaauggaaaga

SEQ ID NO: 34732 - RNA, 19 nt, artificial
  Chemically synthesized
ccacuuuccucagcuccuu

SEQ ID NO: 34733 - RNA, 19 nt, artificial
  Chemically synthesized
aguuccucauguagaccuu

SEQ ID NO: 34734 - RNA, 19 nt, artificial
  Chemically synthesized
ucuucccauuccagaggca

SEQ ID NO: 34735 - RNA, 19 nt, artificial
  Chemically synthesized
agaagacccucacugaaua

SEQ ID NO: 34736 - RNA, 19 nt, artificial
  Chemically synthesized
cacuauuagaguugauugu

SEQ ID NO: 34737 - RNA, 19 nt, artificial
  Chemically synthesized
gguuuuacuucuucucagu

SEQ ID NO: 34738 - RNA, 19 nt, artificial
  Chemically synthesized
accagagagagcucagaua

SEQ ID NO: 34739 - RNA, 19 nt, artificial
  Chemically synthesized
gcucauaaacauuagguga

SEQ ID NO: 34740 - RNA, 19 nt, artificial
  Chemically synthesized
agaacaccugguagcugcu

SEQ ID NO: 34741 - RNA, 19 nt, artificial
  Chemically synthesized
ccaaagugcuucucuuaga

SEQ ID NO: 34742 - RNA, 19 nt, artificial
  Chemically synthesized
accuugagaggugaguuaa

SEQ ID NO: 34743 - RNA, 19 nt, artificial
  Chemically synthesized
gagagagcucagauacguu

SEQ ID NO: 34744 - RNA, 19 nt, artificial
  Chemically synthesized
gccuauuugcuucuccaaa

SEQ ID NO: 34745 - RNA, 19 nt, artificial
  Chemically synthesized
caggaagcauucaaaaucu

SEQ ID NO: 34746 - RNA, 19 nt, artificial
  Chemically synthesized
agagcucagauacguugac

SEQ ID NO: 34747 - RNA, 19 nt, artificial
  Chemically synthesized
cauggaccuugaguuggac

SEQ ID NO: 34748 - RNA, 19 nt, artificial
  Chemically synthesized
gcuucucccucuucacaug

SEQ ID NO: 34749 - RNA, 19 nt, artificial
  Chemically synthesized
gcaagcuggaucucucuua

SEQ ID NO: 34750 - RNA, 19 nt, artificial
  Chemically synthesized
gcccaguuucauugaucac

SEQ ID NO: 34751 - RNA, 19 nt, artificial
  Chemically synthesized
cggaaguauacuuuggaau

SEQ ID NO: 34752 - RNA, 19 nt, artificial
  Chemically synthesized
ggaaaacaucauuaguagc

SEQ ID NO: 34753 - RNA, 19 nt, artificial
  Chemically synthesized
gaaccaugaaaaacaucac

SEQ ID NO: 34754 - RNA, 19 nt, artificial
  Chemically synthesized
aaacaucucucuugcuuau

SEQ ID NO: 34755 - RNA, 19 nt, artificial
  Chemically synthesized
gcaaccagaaccaugaaaa

SEQ ID NO: 34756 - RNA, 19 nt, artificial
  Chemically synthesized
guagcugcuuuuucaugcu

SEQ ID NO: 34757 - RNA, 19 nt, artificial
  Chemically synthesized
aggucacaaccauguaucu

SEQ ID NO: 34758 - RNA, 19 nt, artificial
  Chemically synthesized
ccaugaaaaacaucacaag

SEQ ID NO: 34759 - RNA, 19 nt, artificial
  Chemically synthesized
cuucuuacuugaccucaaa

SEQ ID NO: 34760 - RNA, 19 nt, artificial
  Chemically synthesized
gguucccucucuucuucag

SEQ ID NO: 34761 - RNA, 19 nt, artificial
  Chemically synthesized
gaccucaaaugcauguaag

SEQ ID NO: 34762 - RNA, 19 nt, artificial
  Chemically synthesized
gaguuuccauagcuaaggg

SEQ ID NO: 34763 - RNA, 19 nt, artificial
  Chemically synthesized
gucucaagguccacuuggu

SEQ ID NO: 34764 - RNA, 19 nt, artificial
  Chemically synthesized
aacccauauuuuccuaaua

SEQ ID NO: 34765 - RNA, 19 nt, artificial
  Chemically synthesized
ggcacuaagaugaguguag

SEQ ID NO: 34766 - RNA, 19 nt, artificial
  Chemically synthesized
agcuuauauaagccgaaaa

SEQ ID NO: 34767 - RNA, 19 nt, artificial
  Chemically synthesized
gagagcucagauacguuga

SEQ ID NO: 34768 - RNA, 19 nt, artificial
  Chemically synthesized
gagaggugaguuaaaaggu

SEQ ID NO: 34769 - RNA, 19 nt, artificial
  Chemically synthesized
agagcuuauauaagccgaa

SEQ ID NO: 34770 - RNA, 19 nt, artificial
  Chemically synthesized
aagcuggaucucucuuaua

SEQ ID NO: 34771 - RNA, 19 nt, artificial
  Chemically synthesized
gaaaaacgucugagauucc

SEQ ID NO: 34772 - RNA, 19 nt, artificial
  Chemically synthesized
gaguguagaacaccuggua

SEQ ID NO: 34773 - RNA, 19 nt, artificial
  Chemically synthesized
cauaaacauuaggugaguu

SEQ ID NO: 34774 - RNA, 19 nt, artificial
  Chemically synthesized
ggaccuugaguuggacuug

SEQ ID NO: 34775 - RNA, 19 nt, artificial
  Chemically synthesized
gagcucagauacguugaca

SEQ ID NO: 34776 - RNA, 19 nt, artificial
  Chemically synthesized
acguugacauauaaaugau

SEQ ID NO: 34777 - RNA, 19 nt, artificial
  Chemically synthesized
accucaaaugcauguaaga

SEQ ID NO: 34778 - RNA, 19 nt, artificial
  Chemically synthesized
acuuuggaauauacaaagu

SEQ ID NO: 34779 - RNA, 19 nt, artificial
  Chemically synthesized
caaaugcaacccauauuuu

SEQ ID NO: 34780 - RNA, 19 nt, artificial
  Chemically synthesized
acgucugagauuccucaaa

SEQ ID NO: 34781 - RNA, 19 nt, artificial
  Chemically synthesized
ucagcacugguaagauuga

SEQ ID NO: 34782 - RNA, 19 nt, artificial
  Chemically synthesized
ccuguugcugacugcucaa

SEQ ID NO: 34783 - RNA, 19 nt, artificial
  Chemically synthesized
ccgucauauuccuccauuu

SEQ ID NO: 34784 - RNA, 19 nt, artificial
  Chemically synthesized
guugauugucaggaagcau

SEQ ID NO: 34785 - RNA, 19 nt, artificial
  Chemically synthesized
aagaggaggcaagcuggau

SEQ ID NO: 34786 - RNA, 19 nt, artificial
  Chemically synthesized
acuucacaauaucuacauu

SEQ ID NO: 34787 - RNA, 19 nt, artificial
  Chemically synthesized
cuugagaggugaguuaaaa

SEQ ID NO: 34788 - RNA, 19 nt, artificial
  Chemically synthesized
cagacauuuugaacccugu

SEQ ID NO: 34789 - RNA, 19 nt, artificial
  Chemically synthesized
gacuugccuguuaaauggg

SEQ ID NO: 34790 - RNA, 19 nt, artificial
  Chemically synthesized
ccaaaacaucucucuugcu

SEQ ID NO: 34791 - RNA, 19 nt, artificial
  Chemically synthesized
agccgaaaaacgucugaga

SEQ ID NO: 34792 - RNA, 19 nt, artificial
  Chemically synthesized
cauucucggugccuguaac

SEQ ID NO: 34793 - RNA, 19 nt, artificial
  Chemically synthesized
gguucaugucuucuuacuu

SEQ ID NO: 34794 - RNA, 19 nt, artificial
  Chemically synthesized
gcacugguaagauugaaca

SEQ ID NO: 34795 - RNA, 19 nt, artificial
  Chemically synthesized
gcccagaguucuauguucu

SEQ ID NO: 34796 - RNA, 19 nt, artificial
  Chemically synthesized
guagaggcugaggugucaa

SEQ ID NO: 34797 - RNA, 19 nt, artificial
  Chemically synthesized
gugcuucucuuagagcuua

SEQ ID NO: 34798 - RNA, 19 nt, artificial
  Chemically synthesized
caauugcacuggaaauaca

SEQ ID NO: 34799 - RNA, 19 nt, artificial
  Chemically synthesized
caaccauguaucugaaaga

SEQ ID NO: 34800 - RNA, 19 nt, artificial
  Chemically synthesized
ccuaccaaggcaaccagaa

SEQ ID NO: 34801 - RNA, 19 nt, artificial
  Chemically synthesized
ccauaggugucuucccauu

SEQ ID NO: 34802 - RNA, 19 nt, artificial
  Chemically synthesized
cugguagacucucggaguu

SEQ ID NO: 34803 - RNA, 19 nt, artificial
  Chemically synthesized
ccacuugguucaugucuuc

SEQ ID NO: 34804 - RNA, 19 nt, artificial
  Chemically synthesized
ggccucuuucagccucuuu

SEQ ID NO: 34805 - RNA, 19 nt, artificial
  Chemically synthesized
ccucaaaugcauguaagaa

SEQ ID NO: 34806 - RNA, 19 nt, artificial
  Chemically synthesized
cccggaaguauacuuugga

SEQ ID NO: 34807 - RNA, 19 nt, artificial
  Chemically synthesized
gaguuggacuugccuguua

SEQ ID NO: 34808 - RNA, 19 nt, artificial
  Chemically synthesized
agcuccuucuguaggugga

SEQ ID NO: 34809 - RNA, 19 nt, artificial
  Chemically synthesized
aggaagcauucaaaaucuu

SEQ ID NO: 34810 - RNA, 19 nt, artificial
  Chemically synthesized
gcugcuuuuucaugcuucu

SEQ ID NO: 34811 - RNA, 21 nt, artificial
  Chemically synthesized
ccauuaugauucuuuguuaca

SEQ ID NO: 34812 - RNA, 21 nt, artificial
  Chemically synthesized
ugugcauuuuugugaaaugaa

SEQ ID NO: 34813 - RNA, 21 nt, artificial
  Chemically synthesized
agagaauguagauauugugaa

SEQ ID NO: 34814 - RNA, 21 nt, artificial
  Chemically synthesized
ugaggauuuaagggauggaaa

SEQ ID NO: 34815 - RNA, 21 nt, artificial
  Chemically synthesized
gugcauuuuugugaaaugaaa

SEQ ID NO: 34816 - RNA, 21 nt, artificial
  Chemically synthesized
caacucuaauagugcuuaaaa

SEQ ID NO: 34817 - RNA, 21 nt, artificial
  Chemically synthesized
aacucuaauagugcuuaaaaa

SEQ ID NO: 34818 - RNA, 21 nt, artificial
  Chemically synthesized
gaauguagauauugugaagua

SEQ ID NO: 34819 - RNA, 21 nt, artificial
  Chemically synthesized
ugcauuuuugugaaaugaaaa

SEQ ID NO: 34820 - RNA, 21 nt, artificial
  Chemically synthesized
gugaaaugaaaacauguaaua

SEQ ID NO: 34821 - RNA, 21 nt, artificial
  Chemically synthesized
cuuuguauauuccaaaguaua

SEQ ID NO: 34822 - RNA, 21 nt, artificial
  Chemically synthesized
cuaauagugcuuaaaaaucau

SEQ ID NO: 34823 - RNA, 21 nt, artificial
  Chemically synthesized
acucuaauagugcuuaaaaau

SEQ ID NO: 34824 - RNA, 21 nt, artificial
  Chemically synthesized
gugaaguacauauuaggaaaa

SEQ ID NO: 34825 - RNA, 21 nt, artificial
  Chemically synthesized
guagauauugugaaguacaua

SEQ ID NO: 34826 - RNA, 21 nt, artificial
  Chemically synthesized
uugugaaguacauauuaggaa

SEQ ID NO: 34827 - RNA, 21 nt, artificial
  Chemically synthesized
ugcugaucauuuauaugucaa

SEQ ID NO: 34828 - RNA, 21 nt, artificial
  Chemically synthesized
aguauuuaggcagauugaaaa

SEQ ID NO: 34829 - RNA, 21 nt, artificial
  Chemically synthesized
cuguacuuuguauauuccaaa

SEQ ID NO: 34830 - RNA, 21 nt, artificial
  Chemically synthesized
gauauugugaaguacauauua

SEQ ID NO: 34831 - RNA, 21 nt, artificial
  Chemically synthesized
uguagauauugugaaguacau

SEQ ID NO: 34832 - RNA, 21 nt, artificial
  Chemically synthesized
gaaguacauauuaggaaaaua

SEQ ID NO: 34833 - RNA, 21 nt, artificial
  Chemically synthesized
cuacuaaugauguuuuccuau

SEQ ID NO: 34834 - RNA, 21 nt, artificial
  Chemically synthesized
uugugaaaugaaaacauguaa

SEQ ID NO: 34835 - RNA, 21 nt, artificial
  Chemically synthesized
acuaaugauguuuuccuauaa

SEQ ID NO: 34836 - RNA, 21 nt, artificial
  Chemically synthesized
auguagauauugugaaguaca

SEQ ID NO: 34837 - RNA, 21 nt, artificial
  Chemically synthesized
ccugaggauuuaagggaugga

SEQ ID NO: 34838 - RNA, 21 nt, artificial
  Chemically synthesized
cauuuauaugucaacguaucu

SEQ ID NO: 34839 - RNA, 21 nt, artificial
  Chemically synthesized
cuaaugauguuuuccuauaau

SEQ ID NO: 34840 - RNA, 21 nt, artificial
  Chemically synthesized
cuuauauaagcucuaagagaa

SEQ ID NO: 34841 - RNA, 21 nt, artificial
  Chemically synthesized
ugugaaguacauauuaggaaa

SEQ ID NO: 34842 - RNA, 21 nt, artificial
  Chemically synthesized
aagagagaauguagauauugu

SEQ ID NO: 34843 - RNA, 21 nt, artificial
  Chemically synthesized
uacuaaugauguuuuccuaua

SEQ ID NO: 34844 - RNA, 21 nt, artificial
  Chemically synthesized
uagaugugcauuuuugugaaa

SEQ ID NO: 34845 - RNA, 21 nt, artificial
  Chemically synthesized
ucaacucuaauagugcuuaaa

SEQ ID NO: 34846 - RNA, 21 nt, artificial
  Chemically synthesized
uagauauugugaaguacauau

SEQ ID NO: 34847 - RNA, 21 nt, artificial
  Chemically synthesized
ucuaauagugcuuaaaaauca

SEQ ID NO: 34848 - RNA, 21 nt, artificial
  Chemically synthesized
ugugaaaugaaaacauguaau

SEQ ID NO: 34849 - RNA, 21 nt, artificial
  Chemically synthesized
auugaaaaggacaccuuuuaa

SEQ ID NO: 34850 - RNA, 21 nt, artificial
  Chemically synthesized
agauauugugaaguacauauu

SEQ ID NO: 34851 - RNA, 21 nt, artificial
  Chemically synthesized
gcauuuuugugaaaugaaaac

SEQ ID NO: 34852 - RNA, 21 nt, artificial
  Chemically synthesized
gccugagaguauuuaggcaga

SEQ ID NO: 34853 - RNA, 21 nt, artificial
  Chemically synthesized
uuagcuauggaaacucuauaa

SEQ ID NO: 34854 - RNA, 21 nt, artificial
  Chemically synthesized
cauuuggucaagauuuugaau

SEQ ID NO: 34855 - RNA, 21 nt, artificial
  Chemically synthesized
agaugugcauuuuugugaaau

SEQ ID NO: 34856 - RNA, 21 nt, artificial
  Chemically synthesized
cuacaugaggaacucuaagua

SEQ ID NO: 34857 - RNA, 21 nt, artificial
  Chemically synthesized
gaucauuuauaugucaacgua

SEQ ID NO: 34858 - RNA, 21 nt, artificial
  Chemically synthesized
cuaaagagagaauguagauau

SEQ ID NO: 34859 - RNA, 21 nt, artificial
  Chemically synthesized
ucuucacuucuaaaugcauau

SEQ ID NO: 34860 - RNA, 21 nt, artificial
  Chemically synthesized
agugcuuaaaaaucauugauu

SEQ ID NO: 34861 - RNA, 21 nt, artificial
  Chemically synthesized
cauuuuugugaaaugaaaaca

SEQ ID NO: 34862 - RNA, 21 nt, artificial
  Chemically synthesized
gcauaauaagcuaaagaggcu

SEQ ID NO: 34863 - RNA, 21 nt, artificial
  Chemically synthesized
caccuauggaauuguccugcu

SEQ ID NO: 34864 - RNA, 21 nt, artificial
  Chemically synthesized
uuuugugaaaugaaaacaugu

SEQ ID NO: 34865 - RNA, 21 nt, artificial
  Chemically synthesized
ugcuuaaaaaucauugauugu

SEQ ID NO: 34866 - RNA, 21 nt, artificial
  Chemically synthesized
aaauauuuauguagaugugca

SEQ ID NO: 34867 - RNA, 21 nt, artificial
  Chemically synthesized
cucuaauagugcuuaaaaauc

SEQ ID NO: 34868 - RNA, 21 nt, artificial
  Chemically synthesized
gguguucuacacucaucuuag

SEQ ID NO: 34869 - RNA, 21 nt, artificial
  Chemically synthesized
uaaagagagaauguagauauu

SEQ ID NO: 34870 - RNA, 21 nt, artificial
  Chemically synthesized
ugaucauuuauaugucaacgu

SEQ ID NO: 34871 - RNA, 21 nt, artificial
  Chemically synthesized
cuuuccauuaugauucuuugu

SEQ ID NO: 34872 - RNA, 21 nt, artificial
  Chemically synthesized
augguugugaccugaggauuu

SEQ ID NO: 34873 - RNA, 21 nt, artificial
  Chemically synthesized
ugaaguacauauuaggaaaau

SEQ ID NO: 34874 - RNA, 21 nt, artificial
  Chemically synthesized
uauguagaugugcauuuuugu

SEQ ID NO: 34875 - RNA, 21 nt, artificial
  Chemically synthesized
uuugugaaaugaaaacaugua

SEQ ID NO: 34876 - RNA, 21 nt, artificial
  Chemically synthesized
agcacuuugggauucuuucca

SEQ ID NO: 34877 - RNA, 21 nt, artificial
  Chemically synthesized
uuccauuaugauucuuuguua

SEQ ID NO: 34878 - RNA, 21 nt, artificial
  Chemically synthesized
aauauuuauguagaugugcau

SEQ ID NO: 34879 - RNA, 21 nt, artificial
  Chemically synthesized
aucauuuauaugucaacguau

SEQ ID NO: 34880 - RNA, 21 nt, artificial
  Chemically synthesized
caacucaagguccaugccucu

SEQ ID NO: 34881 - RNA, 21 nt, artificial
  Chemically synthesized
gauucuuuccauuaugauucu

SEQ ID NO: 34882 - RNA, 21 nt, artificial
  Chemically synthesized
guacauauuaggaaaauaugg

SEQ ID NO: 34883 - RNA, 21 nt, artificial
  Chemically synthesized
aaacucuauaagagagaucca

SEQ ID NO: 34884 - RNA, 21 nt, artificial
  Chemically synthesized
ggguucaaaaugucuguagcu

SEQ ID NO: 34885 - RNA, 21 nt, artificial
  Chemically synthesized
aggauuuaagggauggaaaag

SEQ ID NO: 34886 - RNA, 21 nt, artificial
  Chemically synthesized
cucucucuggucaauuuugag

SEQ ID NO: 34887 - RNA, 21 nt, artificial
  Chemically synthesized
guguucuacacucaucuuagu

SEQ ID NO: 34888 - RNA, 21 nt, artificial
  Chemically synthesized
acuaaagagagaauguagaua

SEQ ID NO: 34889 - RNA, 21 nt, artificial
  Chemically synthesized
accagugcugaucauuuauau

SEQ ID NO: 34890 - RNA, 21 nt, artificial
  Chemically synthesized
gagguguuucccuuagcuaug

SEQ ID NO: 34891 - RNA, 21 nt, artificial
  Chemically synthesized
cuccucaacucaccuaauguu

SEQ ID NO: 34892 - RNA, 21 nt, artificial
  Chemically synthesized
ggcuuauauaagcucuaagag

SEQ ID NO: 34893 - RNA, 21 nt, artificial
  Chemically synthesized
gacugucuuucagauacaugg

SEQ ID NO: 34894 - RNA, 21 nt, artificial
  Chemically synthesized
aucaacucuaauagugcuuaa

SEQ ID NO: 34895 - RNA, 21 nt, artificial
  Chemically synthesized
acauauuaggaaaauaugggu

SEQ ID NO: 34896 - RNA, 21 nt, artificial
  Chemically synthesized
ggauuuaagggauggaaaagg

SEQ ID NO: 34897 - RNA, 21 nt, artificial
  Chemically synthesized
caggguucaaaaugucuguag

SEQ ID NO: 34898 - RNA, 21 nt, artificial
  Chemically synthesized
gacucauuucauuccuaacac

SEQ ID NO: 34899 - RNA, 21 nt, artificial
  Chemically synthesized
ucuugagcagucagcaacagg

SEQ ID NO: 34900 - RNA, 21 nt, artificial
  Chemically synthesized
uauugugaaguacauauuagg

SEQ ID NO: 34901 - RNA, 21 nt, artificial
  Chemically synthesized
uagugcuuaaaaaucauugau

SEQ ID NO: 34902 - RNA, 21 nt, artificial
  Chemically synthesized
aagggauggaaaaggaagacu

SEQ ID NO: 34903 - RNA, 21 nt, artificial
  Chemically synthesized
aguacauauuaggaaaauaug

SEQ ID NO: 34904 - RNA, 21 nt, artificial
  Chemically synthesized
guacuuuguauauuccaaagu

SEQ ID NO: 34905 - RNA, 21 nt, artificial
  Chemically synthesized
ugagcucucucuggucaauuu

SEQ ID NO: 34906 - RNA, 21 nt, artificial
  Chemically synthesized
aaaaggacaccuuuuaacuca

SEQ ID NO: 34907 - RNA, 21 nt, artificial
  Chemically synthesized
accgagaauguuguauucagu

SEQ ID NO: 34908 - RNA, 21 nt, artificial
  Chemically synthesized
cguuuuucggcuuauauaagc

SEQ ID NO: 34909 - RNA, 21 nt, artificial
  Chemically synthesized
gauguuucagcucuuccaccu

SEQ ID NO: 34910 - RNA, 21 nt, artificial
  Chemically synthesized
acuuuguauauuccaaaguau

SEQ ID NO: 34911 - RNA, 21 nt, artificial
  Chemically synthesized
acugcacuacugggcagaugu

SEQ ID NO: 34912 - RNA, 21 nt, artificial
  Chemically synthesized
ccagacaaauggaggaauaug

SEQ ID NO: 34913 - RNA, 21 nt, artificial
  Chemically synthesized
aaagagagaauguagauauug

SEQ ID NO: 34914 - RNA, 21 nt, artificial
  Chemically synthesized
gugccugagaguauuuaggca

SEQ ID NO: 34915 - RNA, 21 nt, artificial
  Chemically synthesized
augacuaaagagagaauguag

SEQ ID NO: 34916 - RNA, 21 nt, artificial
  Chemically synthesized
gaauuguccugcuuucuggag

SEQ ID NO: 34917 - RNA, 21 nt, artificial
  Chemically synthesized
ugggcuguacuuuguauauuc

SEQ ID NO: 34918 - RNA, 21 nt, artificial
  Chemically synthesized
uguauauuccaaaguauacuu

SEQ ID NO: 34919 - RNA, 21 nt, artificial
  Chemically synthesized
uuuccauuaugauucuuuguu

SEQ ID NO: 34920 - RNA, 21 nt, artificial
  Chemically synthesized
uuauauaagcucuaagagaag

SEQ ID NO: 34921 - RNA, 21 nt, artificial
  Chemically synthesized
ggcagauugaaaaggacaccu

SEQ ID NO: 34922 - RNA, 21 nt, artificial
  Chemically synthesized
cugggcuguacuuuguauauu

SEQ ID NO: 34923 - RNA, 21 nt, artificial
  Chemically synthesized
ggcaguguucaaucuuaccag

SEQ ID NO: 34924 - RNA, 21 nt, artificial
  Chemically synthesized
cuggagugaaguauaagaagg

SEQ ID NO: 34925 - RNA, 21 nt, artificial
  Chemically synthesized
cagauacaugguugugaccug

SEQ ID NO: 34926 - RNA, 21 nt, artificial
  Chemically synthesized
uucagcucuuccaccuacaga

SEQ ID NO: 34927 - RNA, 21 nt, artificial
  Chemically synthesized
agcuacuaaugauguuuuccu

SEQ ID NO: 34928 - RNA, 21 nt, artificial
  Chemically synthesized
caauuuugaggaaucucagac

SEQ ID NO: 34929 - RNA, 21 nt, artificial
  Chemically synthesized
cuuaaaaaucauugauuguca

SEQ ID NO: 34930 - RNA, 21 nt, artificial
  Chemically synthesized
cauuaugauucuuuguuacag

SEQ ID NO: 34931 - RNA, 21 nt, artificial
  Chemically synthesized
uugugaucaaugaaacugggc

SEQ ID NO: 34932 - RNA, 21 nt, artificial
  Chemically synthesized
aagcaagagagauguuuuggg

SEQ ID NO: 34933 - RNA, 21 nt, artificial
  Chemically synthesized
agcaucaucuuuggagaagca

SEQ ID NO: 34934 - RNA, 21 nt, artificial
  Chemically synthesized
uaagcucuaagagaagcacuu

SEQ ID NO: 34935 - RNA, 21 nt, artificial
  Chemically synthesized
ugaugagcuacugcacuacug

SEQ ID NO: 34936 - RNA, 21 nt, artificial
  Chemically synthesized
gggcuguacuuuguauauucc

SEQ ID NO: 34937 - RNA, 21 nt, artificial
  Chemically synthesized
agcucuuccaccuacagaagg

SEQ ID NO: 34938 - RNA, 21 nt, artificial
  Chemically synthesized
auagugcuuaaaaaucauuga

SEQ ID NO: 34939 - RNA, 21 nt, artificial
  Chemically synthesized
uagcuccucaacucaccuaau

SEQ ID NO: 34940 - RNA, 21 nt, artificial
  Chemically synthesized
uaggcagauugaaaaggacac

SEQ ID NO: 34941 - RNA, 21 nt, artificial
  Chemically synthesized
uugugaccugaggauuuaagg

SEQ ID NO: 34942 - RNA, 21 nt, artificial
  Chemically synthesized
aucuacuggguggacagcagu

SEQ ID NO: 34943 - RNA, 21 nt, artificial
  Chemically synthesized
agacaccuauggaauuguccu

SEQ ID NO: 34944 - RNA, 21 nt, artificial
  Chemically synthesized
gucuacaugaggaacucuaag

SEQ ID NO: 34945 - RNA, 21 nt, artificial
  Chemically synthesized
aauaagcuaaagaggcugaaa

SEQ ID NO: 34946 - RNA, 21 nt, artificial
  Chemically synthesized
accacaggguucaaaaugucu

SEQ ID NO: 34947 - RNA, 21 nt, artificial
  Chemically synthesized
gaaaauauggguugcauuugg

SEQ ID NO: 34948 - RNA, 21 nt, artificial
  Chemically synthesized
auugugaaguacauauuagga

SEQ ID NO: 34949 - RNA, 21 nt, artificial
  Chemically synthesized
gaugugcauuuuugugaaaug

SEQ ID NO: 34950 - RNA, 21 nt, artificial
  Chemically synthesized
ggaaacucuauaagagagauc

SEQ ID NO: 34951 - RNA, 21 nt, artificial
  Chemically synthesized
caugccucuggaaugggaaga

SEQ ID NO: 34952 - RNA, 21 nt, artificial
  Chemically synthesized
gaccugaggauuuaagggaug

SEQ ID NO: 34953 - RNA, 21 nt, artificial
  Chemically synthesized
cuccuugugauguuuuucaug

SEQ ID NO: 34954 - RNA, 21 nt, artificial
  Chemically synthesized
gucagcuacuaaugauguuuu

SEQ ID NO: 34955 - RNA, 21 nt, artificial
  Chemically synthesized
cagcucuuccaccuacagaag

SEQ ID NO: 34956 - RNA, 21 nt, artificial
  Chemically synthesized
uacacucaucuuagugccuga

SEQ ID NO: 34957 - RNA, 21 nt, artificial
  Chemically synthesized
uuuauaugucaacguaucuga

SEQ ID NO: 34958 - RNA, 21 nt, artificial
  Chemically synthesized
gggauguuucagcucuuccac

SEQ ID NO: 34959 - RNA, 21 nt, artificial
  Chemically synthesized
ucuuuguuacaggcaccgaga

SEQ ID NO: 34960 - RNA, 21 nt, artificial
  Chemically synthesized
aauauggguugcauuugguca

SEQ ID NO: 34961 - RNA, 21 nt, artificial
  Chemically synthesized
guauucagugagggucuucuu

SEQ ID NO: 34962 - RNA, 21 nt, artificial
  Chemically synthesized
aggacugagaagaaguaaaac

SEQ ID NO: 34963 - RNA, 21 nt, artificial
  Chemically synthesized
agacaugaaccaaguggaccu

SEQ ID NO: 34964 - RNA, 21 nt, artificial
  Chemically synthesized
uucuuuccauuaugauucuuu

SEQ ID NO: 34965 - RNA, 21 nt, artificial
  Chemically synthesized
uugaaugcuuccugacaauca

SEQ ID NO: 34966 - RNA, 21 nt, artificial
  Chemically synthesized
cuacugcacuacugggcagau

SEQ ID NO: 34967 - RNA, 21 nt, artificial
  Chemically synthesized
aacagauaagcaagagagaug

SEQ ID NO: 34968 - RNA, 21 nt, artificial
  Chemically synthesized
gggaagaugaugagcuacugc

SEQ ID NO: 34969 - RNA, 21 nt, artificial
  Chemically synthesized
caugaggaacucuaaguaucc

SEQ ID NO: 34970 - RNA, 21 nt, artificial
  Chemically synthesized
aaaggacaccuuuuaacucac

SEQ ID NO: 34971 - RNA, 21 nt, artificial
  Chemically synthesized
cucuauaagagagauccagcu

SEQ ID NO: 34972 - RNA, 21 nt, artificial
  Chemically synthesized
cauuuaacaggcaaguccaac

SEQ ID NO: 34973 - RNA, 21 nt, artificial
  Chemically synthesized
guuucccuuagcuauggaaac

SEQ ID NO: 34974 - RNA, 21 nt, artificial
  Chemically synthesized
cucaucuuagugccugagagu

SEQ ID NO: 34975 - RNA, 21 nt, artificial
  Chemically synthesized
ugugaucaaugaaacugggcu

SEQ ID NO: 34976 - RNA, 21 nt, artificial
  Chemically synthesized
uggaaugggaagacaccuaug

SEQ ID NO: 34977 - RNA, 21 nt, artificial
  Chemically synthesized
guucaaucuuaccagugcuga

SEQ ID NO: 34978 - RNA, 21 nt, artificial
  Chemically synthesized
cuugugauguuuuucaugguu

SEQ ID NO: 34979 - RNA, 21 nt, artificial
  Chemically synthesized
agaaguaaaaccguuugcugg

SEQ ID NO: 34980 - RNA, 21 nt, artificial
  Chemically synthesized
ugucaacguaucugagcucuc

SEQ ID NO: 34981 - RNA, 21 nt, artificial
  Chemically synthesized
agcuaaagaggcugaaagagg

SEQ ID NO: 34982 - RNA, 21 nt, artificial
  Chemically synthesized
agcucuaagagaagcacuuug

SEQ ID NO: 34983 - RNA, 21 nt, artificial
  Chemically synthesized
augugcauuuuugugaaauga

SEQ ID NO: 34984 - RNA, 21 nt, artificial
  Chemically synthesized
gcucuaagagaagcacuuugg

SEQ ID NO: 34985 - RNA, 21 nt, artificial
  Chemically synthesized
cugguugccuugguaggauug

SEQ ID NO: 34986 - RNA, 21 nt, artificial
  Chemically synthesized
cauauuaggaaaauauggguu

SEQ ID NO: 34987 - RNA, 21 nt, artificial
  Chemically synthesized
uacuuuguauauuccaaagua

SEQ ID NO: 34988 - RNA, 21 nt, artificial
  Chemically synthesized
auauugugaaguacauauuag

SEQ ID NO: 34989 - RNA, 21 nt, artificial
  Chemically synthesized
gcuauggaaacucuauaagag

SEQ ID NO: 34990 - RNA, 21 nt, artificial
  Chemically synthesized
agcaugaaaaagcagcuacca

SEQ ID NO: 34991 - RNA, 21 nt, artificial
  Chemically synthesized
agaagcaugaaaaagcagcua

SEQ ID NO: 34992 - RNA, 21 nt, artificial
  Chemically synthesized
uggaaacucuauaagagagau

SEQ ID NO: 34993 - RNA, 21 nt, artificial
  Chemically synthesized
gagaagcaugaaaaagcagcu

SEQ ID NO: 34994 - RNA, 21 nt, artificial
  Chemically synthesized
guucugguugccuugguagga

SEQ ID NO: 34995 - RNA, 21 nt, artificial
  Chemically synthesized
gagaccacaggguucaaaaug

SEQ ID NO: 34996 - RNA, 21 nt, artificial
  Chemically synthesized
gaagaugaugagcuacugcac

SEQ ID NO: 34997 - RNA, 21 nt, artificial
  Chemically synthesized
uauuuauguagaugugcauuu

SEQ ID NO: 34998 - RNA, 21 nt, artificial
  Chemically synthesized
uauggaaacucuauaagagag

SEQ ID NO: 34999 - RNA, 21 nt, artificial
  Chemically synthesized
agccucuacaggacugagaag

SEQ ID NO: 35000 - RNA, 21 nt, artificial
  Chemically synthesized
uguucuacacucaucuuagug

SEQ ID NO: 35001 - RNA, 21 nt, artificial
  Chemically synthesized
uagcuauggaaacucuauaag

SEQ ID NO: 35002 - RNA, 21 nt, artificial
  Chemically synthesized
uacaugaggaacucuaaguau

SEQ ID NO: 35003 - RNA, 21 nt, artificial
  Chemically synthesized
uugaggucaaguaagaagaca

SEQ ID NO: 35004 - RNA, 21 nt, artificial
  Chemically synthesized
ugagaguauuuaggcagauug

SEQ ID NO: 35005 - RNA, 21 nt, artificial
  Chemically synthesized
aaucaacucuaauagugcuua

SEQ ID NO: 35006 - RNA, 21 nt, artificial
  Chemically synthesized
uauggaauuguccugcuuucu

SEQ ID NO: 35007 - RNA, 21 nt, artificial
  Chemically synthesized
uuuauguagaugugcauuuuu

SEQ ID NO: 35008 - RNA, 21 nt, artificial
  Chemically synthesized
cacaggguucaaaaugucugu

SEQ ID NO: 35009 - RNA, 21 nt, artificial
  Chemically synthesized
acaugaggaacucuaaguauc

SEQ ID NO: 35010 - RNA, 21 nt, artificial
  Chemically synthesized
cuuccaccuacagaaggagcu

SEQ ID NO: 35011 - RNA, 21 nt, artificial
  Chemically synthesized
agcuccucaacucaccuaaug

SEQ ID NO: 35012 - RNA, 21 nt, artificial
  Chemically synthesized
ugacaaucaacucuaauagug

SEQ ID NO: 35013 - RNA, 21 nt, artificial
  Chemically synthesized
gaugaugagcuacugcacuac

SEQ ID NO: 35014 - RNA, 21 nt, artificial
  Chemically synthesized
gucaauuuugaggaaucucag

SEQ ID NO: 35015 - RNA, 21 nt, artificial
  Chemically synthesized
auggaauuguccugcuuucug

SEQ ID NO: 35016 - RNA, 21 nt, artificial
  Chemically synthesized
ugaaacugggcuguacuuugu

SEQ ID NO: 35017 - RNA, 21 nt, artificial
  Chemically synthesized
cagcuaccagguguucuacac

SEQ ID NO: 35018 - RNA, 21 nt, artificial
  Chemically synthesized
cuauggaauuguccugcuuuc

SEQ ID NO: 35019 - RNA, 21 nt, artificial
  Chemically synthesized
uugaggaaucucagacguuuu

SEQ ID NO: 35020 - RNA, 21 nt, artificial
  Chemically synthesized
ucagauacaugguugugaccu

SEQ ID NO: 35021 - RNA, 21 nt, artificial
  Chemically synthesized
guuguauucagugagggucuu

SEQ ID NO: 35022 - RNA, 21 nt, artificial
  Chemically synthesized
uugaaaaggacaccuuuuaac

SEQ ID NO: 35023 - RNA, 21 nt, artificial
  Chemically synthesized
agcuaccagguguucuacacu

SEQ ID NO: 35024 - RNA, 21 nt, artificial
  Chemically synthesized
uucggcuuauauaagcucuaa

SEQ ID NO: 35025 - RNA, 21 nt, artificial
  Chemically synthesized
aucuucacuucuaaaugcaua

SEQ ID NO: 35026 - RNA, 21 nt, artificial
  Chemically synthesized
uuacaugcauuugaggucaag

SEQ ID NO: 35027 - RNA, 21 nt, artificial
  Chemically synthesized
auaauaagcuaaagaggcuga

SEQ ID NO: 35028 - RNA, 21 nt, artificial
  Chemically synthesized
uccugcuuucuggagugaagu

SEQ ID NO: 35029 - RNA, 21 nt, artificial
  Chemically synthesized
acaggguucaaaaugucugua

SEQ ID NO: 35030 - RNA, 21 nt, artificial
  Chemically synthesized
gggucuucuuacaugcauuug

SEQ ID NO: 35031 - RNA, 21 nt, artificial
  Chemically synthesized
ucucuggucaauuuugaggaa

SEQ ID NO: 35032 - RNA, 21 nt, artificial
  Chemically synthesized
cucuaagagaagcacuuuggg

SEQ ID NO: 35033 - RNA, 21 nt, artificial
  Chemically synthesized
aaugaaacugggcuguacuuu

SEQ ID NO: 35034 - RNA, 21 nt, artificial
  Chemically synthesized
cugaagaagagagggaaccac

SEQ ID NO: 35035 - RNA, 21 nt, artificial
  Chemically synthesized
agguguuucccuuagcuaugg

SEQ ID NO: 35036 - RNA, 21 nt, artificial
  Chemically synthesized
ugaaacuaacagauaagcaag

SEQ ID NO: 35037 - RNA, 21 nt, artificial
  Chemically synthesized
cucuggaaugggaagacaccu

SEQ ID NO: 35038 - RNA, 21 nt, artificial
  Chemically synthesized
uaagaagacaugaaccaagug

SEQ ID NO: 35039 - RNA, 21 nt, artificial
  Chemically synthesized
cucuugagcagucagcaacag

SEQ ID NO: 35040 - RNA, 21 nt, artificial
  Chemically synthesized
cagcaucuucacuucuaaaug

SEQ ID NO: 35041 - RNA, 21 nt, artificial
  Chemically synthesized
agaauguagauauugugaagu

SEQ ID NO: 35042 - RNA, 21 nt, artificial
  Chemically synthesized
acugucuuucagauacauggu

SEQ ID NO: 35043 - RNA, 21 nt, artificial
  Chemically synthesized
uccucuugagcagucagcaac

SEQ ID NO: 35044 - RNA, 21 nt, artificial
  Chemically synthesized
aagcuaaagaggcugaaagag

SEQ ID NO: 35045 - RNA, 21 nt, artificial
  Chemically synthesized
auuuaacaggcaaguccaacu

SEQ ID NO: 35046 - RNA, 21 nt, artificial
  Chemically synthesized
gaugagcuacugcacuacugg

SEQ ID NO: 35047 - RNA, 21 nt, artificial
  Chemically synthesized
uccauuaugauucuuuguuac

SEQ ID NO: 35048 - RNA, 21 nt, artificial
  Chemically synthesized
aucaucuuuggagaagcaaau

SEQ ID NO: 35049 - RNA, 21 nt, artificial
  Chemically synthesized
accaaguggaccuugagacca

SEQ ID NO: 35050 - RNA, 21 nt, artificial
  Chemically synthesized
uuuaagggauggaaaaggaag

SEQ ID NO: 35051 - RNA, 21 nt, artificial
  Chemically synthesized
aagacaccuauggaauugucc

SEQ ID NO: 35052 - RNA, 21 nt, artificial
  Chemically synthesized
uuguccugcuuucuggaguga

SEQ ID NO: 35053 - RNA, 21 nt, artificial
  Chemically synthesized
auccagcuugccuccucuuga

SEQ ID NO: 35054 - RNA, 21 nt, artificial
  Chemically synthesized
ugaaaaagcagcuaccaggug

SEQ ID NO: 35055 - RNA, 21 nt, artificial
  Chemically synthesized
ggcuugcauaauaagcuaaag

SEQ ID NO: 35056 - RNA, 21 nt, artificial
  Chemically synthesized
uuaggaaaauauggguugcau

SEQ ID NO: 35057 - RNA, 21 nt, artificial
  Chemically synthesized
cagcuacuaaugauguuuucc

SEQ ID NO: 35058 - RNA, 21 nt, artificial
  Chemically synthesized
cguaucugagcucucucuggu

SEQ ID NO: 35059 - RNA, 21 nt, artificial
  Chemically synthesized
aaagcagcuaccagguguucu

SEQ ID NO: 35060 - RNA, 21 nt, artificial
  Chemically synthesized
gacaaucaacucuaauagugc

SEQ ID NO: 35061 - RNA, 21 nt, artificial
  Chemically synthesized
gaggaaucucagacguuuuuc

SEQ ID NO: 35062 - RNA, 21 nt, artificial
  Chemically synthesized
acggaagaacauagaacucug

SEQ ID NO: 35063 - RNA, 21 nt, artificial
  Chemically synthesized
ggcccauuuaacaggcaaguc

SEQ ID NO: 35064 - RNA, 21 nt, artificial
  Chemically synthesized
acagcaucaucuuuggagaag

SEQ ID NO: 35065 - RNA, 21 nt, artificial
  Chemically synthesized
uugcauuuggucaagauuuug

SEQ ID NO: 35066 - RNA, 21 nt, artificial
  Chemically synthesized
guccugcuuucuggagugaag

SEQ ID NO: 35067 - RNA, 21 nt, artificial
  Chemically synthesized
auucuuuccauuaugauucuu

SEQ ID NO: 35068 - RNA, 21 nt, artificial
  Chemically synthesized
gaggucaaguaagaagacaug

SEQ ID NO: 35069 - RNA, 21 nt, artificial
  Chemically synthesized
acaggcaaguccaacucaagg

SEQ ID NO: 35070 - RNA, 21 nt, artificial
  Chemically synthesized
uucagauacaugguugugacc

SEQ ID NO: 35071 - RNA, 21 nt, artificial
  Chemically synthesized
uuuguauauuccaaaguauac

SEQ ID NO: 35072 - RNA, 21 nt, artificial
  Chemically synthesized
aacucaccuaauguuuaugag

SEQ ID NO: 35073 - RNA, 21 nt, artificial
  Chemically synthesized
uguuacaggcaccgagaaugu

SEQ ID NO: 35074 - RNA, 21 nt, artificial
  Chemically synthesized
auucagugagggucuucuuac

SEQ ID NO: 35075 - RNA, 21 nt, artificial
  Chemically synthesized
caagauuuugaaugcuuccug

SEQ ID NO: 35076 - RNA, 21 nt, artificial
  Chemically synthesized
uccuugacaccucagccucua

SEQ ID NO: 35077 - RNA, 21 nt, artificial
  Chemically synthesized
uuguauauuccaaaguauacu

SEQ ID NO: 35078 - RNA, 21 nt, artificial
  Chemically synthesized
uggaauuguccugcuuucugg

SEQ ID NO: 35079 - RNA, 21 nt, artificial
  Chemically synthesized
gaccacaggguucaaaauguc

SEQ ID NO: 35080 - RNA, 21 nt, artificial
  Chemically synthesized
aauagugcuuaaaaaucauug

SEQ ID NO: 35081 - RNA, 21 nt, artificial
  Chemically synthesized
aaaggaagacuagaggcuugc

SEQ ID NO: 35082 - RNA, 21 nt, artificial
  Chemically synthesized
cuagaggcuugcauaauaagc

SEQ ID NO: 35083 - RNA, 21 nt, artificial
  Chemically synthesized
augacggaagaacauagaacu

SEQ ID NO: 35084 - RNA, 21 nt, artificial
  Chemically synthesized
aagaaguaaaaccguuugcug

SEQ ID NO: 35085 - RNA, 21 nt, artificial
  Chemically synthesized
acagauaagcaagagagaugu

SEQ ID NO: 35086 - RNA, 21 nt, artificial
  Chemically synthesized
gcccauuuaacaggcaagucc

SEQ ID NO: 35087 - RNA, 21 nt, artificial
  Chemically synthesized
ugucagcuacuaaugauguuu

SEQ ID NO: 35088 - RNA, 21 nt, artificial
  Chemically synthesized
ccugaaaaaaaggagcugagg

SEQ ID NO: 35089 - RNA, 21 nt, artificial
  Chemically synthesized
uggucaauuuugaggaaucuc

SEQ ID NO: 35090 - RNA, 21 nt, artificial
  Chemically synthesized
gugcuuaaaaaucauugauug

SEQ ID NO: 35091 - RNA, 21 nt, artificial
  Chemically synthesized
aucuuaccagugcugaucauu

SEQ ID NO: 35092 - RNA, 21 nt, artificial
  Chemically synthesized
guuuuucggcuuauauaagcu

SEQ ID NO: 35093 - RNA, 21 nt, artificial
  Chemically synthesized
uuucaugguucugguugccuu

SEQ ID NO: 35094 - RNA, 21 nt, artificial
  Chemically synthesized
aauuguccugcuuucuggagu

SEQ ID NO: 35095 - RNA, 21 nt, artificial
  Chemically synthesized
uuuucaugguucugguugccu

SEQ ID NO: 35096 - RNA, 21 nt, artificial
  Chemically synthesized
augaugagcuacugcacuacu

SEQ ID NO: 35097 - RNA, 21 nt, artificial
  Chemically synthesized
ucccuuagcuauggaaacucu

SEQ ID NO: 35098 - RNA, 21 nt, artificial
  Chemically synthesized
uaagagaagcacuuugggauu

SEQ ID NO: 35099 - RNA, 21 nt, artificial
  Chemically synthesized
gucaagauuuugaaugcuucc

SEQ ID NO: 35100 - RNA, 21 nt, artificial
  Chemically synthesized
augcagcagcccuucaauuac

SEQ ID NO: 35101 - RNA, 21 nt, artificial
  Chemically synthesized
uuugggauucuuuccauuaug

SEQ ID NO: 35102 - RNA, 21 nt, artificial
  Chemically synthesized
augaaccaaguggaccuugag

SEQ ID NO: 35103 - RNA, 21 nt, artificial
  Chemically synthesized
uacauauuaggaaaauauggg

SEQ ID NO: 35104 - RNA, 21 nt, artificial
  Chemically synthesized
gggaagacaccuauggaauug

SEQ ID NO: 35105 - RNA, 21 nt, artificial
  Chemically synthesized
aaaaggagcugaggaaagugg

SEQ ID NO: 35106 - RNA, 21 nt, artificial
  Chemically synthesized
uugagcagucagcaacagggu

SEQ ID NO: 35107 - RNA, 21 nt, artificial
  Chemically synthesized
ugacggaagaacauagaacuc

SEQ ID NO: 35108 - RNA, 21 nt, artificial
  Chemically synthesized
auaagcucuaagagaagcacu

SEQ ID NO: 35109 - RNA, 21 nt, artificial
  Chemically synthesized
gcuuaaaaaucauugauuguc

SEQ ID NO: 35110 - RNA, 21 nt, artificial
  Chemically synthesized
uucaaucuuaccagugcugau

SEQ ID NO: 35111 - RNA, 21 nt, artificial
  Chemically synthesized
aguccaacucaagguccaugc

SEQ ID NO: 35112 - RNA, 21 nt, artificial
  Chemically synthesized
ccugacaaucaacucuaauag

SEQ ID NO: 35113 - RNA, 21 nt, artificial
  Chemically synthesized
accuugagaccacaggguuca

SEQ ID NO: 35114 - RNA, 21 nt, artificial
  Chemically synthesized
aaggucuacaugaggaacucu

SEQ ID NO: 35115 - RNA, 21 nt, artificial
  Chemically synthesized
ugaucaaugaaacugggcugu

SEQ ID NO: 35116 - RNA, 21 nt, artificial
  Chemically synthesized
uugccuccucuugagcaguca

SEQ ID NO: 35117 - RNA, 21 nt, artificial
  Chemically synthesized
aaacuaacagauaagcaagag

SEQ ID NO: 35118 - RNA, 21 nt, artificial
  Chemically synthesized
aaugucuguagcuccucaacu

SEQ ID NO: 35119 - RNA, 21 nt, artificial
  Chemically synthesized
accagguguucuacacucauc

SEQ ID NO: 35120 - RNA, 21 nt, artificial
  Chemically synthesized
gaaaaggacaccuuuuaacuc

SEQ ID NO: 35121 - RNA, 21 nt, artificial
  Chemically synthesized
uacaugcauuugaggucaagu

SEQ ID NO: 35122 - RNA, 21 nt, artificial
  Chemically synthesized
augaaaaagcagcuaccaggu

SEQ ID NO: 35123 - RNA, 21 nt, artificial
  Chemically synthesized
ugccucuggaaugggaagaca

SEQ ID NO: 35124 - RNA, 21 nt, artificial
  Chemically synthesized
gaagaacauagaacucugggc

SEQ ID NO: 35125 - RNA, 21 nt, artificial
  Chemically synthesized
aagcucuaagagaagcacuuu

SEQ ID NO: 35126 - RNA, 21 nt, artificial
  Chemically synthesized
aaaugucuguagcuccucaac

SEQ ID NO: 35127 - RNA, 21 nt, artificial
  Chemically synthesized
uagaggcuugcauaauaagcu

SEQ ID NO: 35128 - RNA, 21 nt, artificial
  Chemically synthesized
gaagacaugaaccaaguggac

SEQ ID NO: 35129 - RNA, 21 nt, artificial
  Chemically synthesized
aacucuauaagagagauccag

SEQ ID NO: 35130 - RNA, 21 nt, artificial
  Chemically synthesized
accugaggauuuaagggaugg

SEQ ID NO: 35131 - RNA, 21 nt, artificial
  Chemically synthesized
ucagcuacuaaugauguuuuc

SEQ ID NO: 35132 - RNA, 21 nt, artificial
  Chemically synthesized
aucauugauugucagcuacua

SEQ ID NO: 35133 - RNA, 21 nt, artificial
  Chemically synthesized
aauguagauauugugaaguac

SEQ ID NO: 35134 - RNA, 21 nt, artificial
  Chemically synthesized
gaagacaccuauggaauuguc

SEQ ID NO: 35135 - RNA, 21 nt, artificial
  Chemically synthesized
gcuaaagaggcugaaagaggc

SEQ ID NO: 35136 - RNA, 21 nt, artificial
  Chemically synthesized
aaaucauugauugucagcuac

SEQ ID NO: 35137 - RNA, 21 nt, artificial
  Chemically synthesized
uuauguagaugugcauuuuug

SEQ ID NO: 35138 - RNA, 21 nt, artificial
  Chemically synthesized
ucaacucaccuaauguuuaug

SEQ ID NO: 35139 - RNA, 21 nt, artificial
  Chemically synthesized
gacaccuauggaauuguccug

SEQ ID NO: 35140 - RNA, 21 nt, artificial
  Chemically synthesized
cucuacaggacugagaagaag

SEQ ID NO: 35141 - RNA, 21 nt, artificial
  Chemically synthesized
ucaagauuuugaaugcuuccu

SEQ ID NO: 35142 - RNA, 21 nt, artificial
  Chemically synthesized
gccuugugaucaaugaaacug

SEQ ID NO: 35143 - RNA, 21 nt, artificial
  Chemically synthesized
uaugacggaagaacauagaac

SEQ ID NO: 35144 - RNA, 21 nt, artificial
  Chemically synthesized
agaacuccgagagucuaccag

SEQ ID NO: 35145 - RNA, 21 nt, artificial
  Chemically synthesized
uucugguugccuugguaggau

SEQ ID NO: 35146 - RNA, 21 nt, artificial
  Chemically synthesized
augaaacugggcuguacuuug

SEQ ID NO: 35147 - RNA, 21 nt, artificial
  Chemically synthesized
aagaugaugagcuacugcacu

SEQ ID NO: 35148 - RNA, 21 nt, artificial
  Chemically synthesized
guguucaaucuuaccagugcu

SEQ ID NO: 35149 - RNA, 21 nt, artificial
  Chemically synthesized
ucugagcucucucuggucaau

SEQ ID NO: 35150 - RNA, 21 nt, artificial
  Chemically synthesized
ggauucuuuccauuaugauuc

SEQ ID NO: 35151 - RNA, 21 nt, artificial
  Chemically synthesized
cuaaagaggcugaaagaggcc

SEQ ID NO: 35152 - RNA, 21 nt, artificial
  Chemically synthesized
ggacaccuuuuaacucaccuc

SEQ ID NO: 35153 - RNA, 21 nt, artificial
  Chemically synthesized
guauauuccaaaguauacuuc

SEQ ID NO: 35154 - RNA, 21 nt, artificial
  Chemically synthesized
uuucagcucuuccaccuacag

SEQ ID NO: 35155 - RNA, 21 nt, artificial
  Chemically synthesized
agugaaguauaagaagggugg

SEQ ID NO: 35156 - RNA, 21 nt, artificial
  Chemically synthesized
auugauugucagcuacuaaug

SEQ ID NO: 35157 - RNA, 21 nt, artificial
  Chemically synthesized
cagcaucaucuuuggagaagc

SEQ ID NO: 35158 - RNA, 21 nt, artificial
  Chemically synthesized
uggaaaaggaagacuagaggc

SEQ ID NO: 35159 - RNA, 21 nt, artificial
  Chemically synthesized
ugcagcagcccuucaauuacc

SEQ ID NO: 35160 - RNA, 21 nt, artificial
  Chemically synthesized
gauucuuuguuacaggcaccg

SEQ ID NO: 35161 - RNA, 21 nt, artificial
  Chemically synthesized
uacaggcaccgagaauguugu

SEQ ID NO: 35162 - RNA, 21 nt, artificial
  Chemically synthesized
uugugauguuuuucaugguuc

SEQ ID NO: 35163 - RNA, 21 nt, artificial
  Chemically synthesized
cuugugaucaaugaaacuggg

SEQ ID NO: 35164 - RNA, 21 nt, artificial
  Chemically synthesized
uccaacucaagguccaugccu

SEQ ID NO: 35165 - RNA, 21 nt, artificial
  Chemically synthesized
cuggucaauuuugaggaaucu

SEQ ID NO: 35166 - RNA, 21 nt, artificial
  Chemically synthesized
ugugaccugaggauuuaaggg

SEQ ID NO: 35167 - RNA, 21 nt, artificial
  Chemically synthesized
ugccugagaguauuuaggcag

SEQ ID NO: 35168 - RNA, 21 nt, artificial
  Chemically synthesized
auacaugguugugaccugagg

SEQ ID NO: 35169 - RNA, 21 nt, artificial
  Chemically synthesized
ugauguuuuucaugguucugg

SEQ ID NO: 35170 - RNA, 21 nt, artificial
  Chemically synthesized
agaauguuguauucagugagg

SEQ ID NO: 35171 - RNA, 21 nt, artificial
  Chemically synthesized
ucaacguaucugagcucucuc

SEQ ID NO: 35172 - RNA, 21 nt, artificial
  Chemically synthesized
auuuggucaagauuuugaaug

SEQ ID NO: 35173 - RNA, 21 nt, artificial
  Chemically synthesized
uaaaaaucauugauugucagc

SEQ ID NO: 35174 - RNA, 21 nt, artificial
  Chemically synthesized
ucuuaccagugcugaucauuu

SEQ ID NO: 35175 - RNA, 21 nt, artificial
  Chemically synthesized
uguacuuuguauauuccaaag

SEQ ID NO: 35176 - RNA, 21 nt, artificial
  Chemically synthesized
auaugucaacguaucugagcu

SEQ ID NO: 35177 - RNA, 21 nt, artificial
  Chemically synthesized
uuaaaaaucauugauugucag

SEQ ID NO: 35178 - RNA, 21 nt, artificial
  Chemically synthesized
aagcaugaaaaagcagcuacc

SEQ ID NO: 35179 - RNA, 21 nt, artificial
  Chemically synthesized
gucaaguaagaagacaugaac

SEQ ID NO: 35180 - RNA, 21 nt, artificial
  Chemically synthesized
uuuuaacucaccucucaaggu

SEQ ID NO: 35181 - RNA, 21 nt, artificial
  Chemically synthesized
uaagggauggaaaaggaagac

SEQ ID NO: 35182 - RNA, 21 nt, artificial
  Chemically synthesized
aaguccaacucaagguccaug

SEQ ID NO: 35183 - RNA, 21 nt, artificial
  Chemically synthesized
aaaaucauugauugucagcua

SEQ ID NO: 35184 - RNA, 21 nt, artificial
  Chemically synthesized
uauggguugcauuuggucaag

SEQ ID NO: 35185 - RNA, 21 nt, artificial
  Chemically synthesized
gaaucucagacguuuuucggc

SEQ ID NO: 35186 - RNA, 21 nt, artificial
  Chemically synthesized
ucuacacucaucuuagugccu

SEQ ID NO: 35187 - RNA, 21 nt, artificial
  Chemically synthesized
gugauguuuuucaugguucug

SEQ ID NO: 35188 - RNA, 21 nt, artificial
  Chemically synthesized
auaagcuaaagaggcugaaag

SEQ ID NO: 35189 - RNA, 21 nt, artificial
  Chemically synthesized
aggaaucucagacguuuuucg

SEQ ID NO: 35190 - RNA, 21 nt, artificial
  Chemically synthesized
uuauaugucaacguaucugag

SEQ ID NO: 35191 - RNA, 21 nt, artificial
  Chemically synthesized
uuuaggcagauugaaaaggac

SEQ ID NO: 35192 - RNA, 21 nt, artificial
  Chemically synthesized
aaaaaggagcugaggaaagug

SEQ ID NO: 35193 - RNA, 21 nt, artificial
  Chemically synthesized
aggcaaguccaacucaagguc

SEQ ID NO: 35194 - RNA, 21 nt, artificial
  Chemically synthesized
cauaauaagcuaaagaggcug

SEQ ID NO: 35195 - RNA, 21 nt, artificial
  Chemically synthesized
ucauuuauaugucaacguauc

SEQ ID NO: 35196 - RNA, 21 nt, artificial
  Chemically synthesized
auaagcaagagagauguuuug

SEQ ID NO: 35197 - RNA, 21 nt, artificial
  Chemically synthesized
uugacaccucagccucuacag

SEQ ID NO: 35198 - RNA, 21 nt, artificial
  Chemically synthesized
gcuaccagguguucuacacuc

SEQ ID NO: 35199 - RNA, 21 nt, artificial
  Chemically synthesized
acaccuuuuaacucaccucuc

SEQ ID NO: 35200 - RNA, 21 nt, artificial
  Chemically synthesized
uaagagagauccagcuugccu

SEQ ID NO: 35201 - RNA, 21 nt, artificial
  Chemically synthesized
uaucugagcucucucugguca

SEQ ID NO: 35202 - RNA, 21 nt, artificial
  Chemically synthesized
aucucagacguuuuucggcuu

SEQ ID NO: 35203 - RNA, 21 nt, artificial
  Chemically synthesized
ucuggucaauuuugaggaauc

SEQ ID NO: 35204 - RNA, 21 nt, artificial
  Chemically synthesized
acuaacagauaagcaagagag

SEQ ID NO: 35205 - RNA, 21 nt, artificial
  Chemically synthesized
gucuucuuacaugcauuugag

SEQ ID NO: 35206 - RNA, 21 nt, artificial
  Chemically synthesized
aagguccaugccucuggaaug

SEQ ID NO: 35207 - RNA, 21 nt, artificial
  Chemically synthesized
auucuuuguuacaggcaccga

SEQ ID NO: 35208 - RNA, 21 nt, artificial
  Chemically synthesized
aacucaagguccaugccucug

SEQ ID NO: 35209 - RNA, 21 nt, artificial
  Chemically synthesized
ucuauaagagagauccagcuu

SEQ ID NO: 35210 - RNA, 21 nt, artificial
  Chemically synthesized
guucaaaaugucuguagcucc

SEQ ID NO: 35211 - RNA, 21 nt, artificial
  Chemically synthesized
ggcaccgagaauguuguauuc

SEQ ID NO: 35212 - RNA, 21 nt, artificial
  Chemically synthesized
uaagcaagagagauguuuugg

SEQ ID NO: 35213 - RNA, 21 nt, artificial
  Chemically synthesized
ucacuucuaaaugcauauccu

SEQ ID NO: 35214 - RNA, 21 nt, artificial
  Chemically synthesized
agugagggucuucuuacaugc

SEQ ID NO: 35215 - RNA, 21 nt, artificial
  Chemically synthesized
uguuuuucaugguucugguug

SEQ ID NO: 35216 - RNA, 21 nt, artificial
  Chemically synthesized
auguagaugugcauuuuugug

SEQ ID NO: 35217 - RNA, 21 nt, artificial
  Chemically synthesized
gacaccuuuuaacucaccucu

SEQ ID NO: 35218 - RNA, 21 nt, artificial
  Chemically synthesized
uauaugucaacguaucugagc

SEQ ID NO: 35219 - RNA, 21 nt, artificial
  Chemically synthesized
aagaagagagggaaccacagc

SEQ ID NO: 35220 - RNA, 21 nt, artificial
  Chemically synthesized
aaaaggaagacuagaggcuug

SEQ ID NO: 35221 - RNA, 21 nt, artificial
  Chemically synthesized
uguauucagugagggucuucu

SEQ ID NO: 35222 - RNA, 21 nt, artificial
  Chemically synthesized
uuacaggcaccgagaauguug

SEQ ID NO: 35223 - RNA, 21 nt, artificial
  Chemically synthesized
auugucagcuacuaaugaugu

SEQ ID NO: 35224 - RNA, 21 nt, artificial
  Chemically synthesized
auggaaaaggaagacuagagg

SEQ ID NO: 35225 - RNA, 21 nt, artificial
  Chemically synthesized
uuguauucagugagggucuuc

SEQ ID NO: 35226 - RNA, 21 nt, artificial
  Chemically synthesized
ugcauaauaagcuaaagaggc

SEQ ID NO: 35227 - RNA, 21 nt, artificial
  Chemically synthesized
acaugaaccaaguggaccuug

SEQ ID NO: 35228 - RNA, 21 nt, artificial
  Chemically synthesized
acguaucugagcucucucugg

SEQ ID NO: 35229 - RNA, 21 nt, artificial
  Chemically synthesized
uuagugccugagaguauuuag

SEQ ID NO: 35230 - RNA, 21 nt, artificial
  Chemically synthesized
aucuuagugccugagaguauu

SEQ ID NO: 35231 - RNA, 21 nt, artificial
  Chemically synthesized
agugcugaucauuuauauguc

SEQ ID NO: 35232 - RNA, 21 nt, artificial
  Chemically synthesized
agaacauagaacucugggcug

SEQ ID NO: 35233 - RNA, 21 nt, artificial
  Chemically synthesized
acucaucuuagugccugagag

SEQ ID NO: 35234 - RNA, 21 nt, artificial
  Chemically synthesized
acucuauaagagagauccagc

SEQ ID NO: 35235 - RNA, 21 nt, artificial
  Chemically synthesized
ucuguagcuccucaacucacc

SEQ ID NO: 35236 - RNA, 21 nt, artificial
  Chemically synthesized
uugcauaauaagcuaaagagg

SEQ ID NO: 35237 - RNA, 21 nt, artificial
  Chemically synthesized
uuugaggucaaguaagaagac

SEQ ID NO: 35238 - RNA, 21 nt, artificial
  Chemically synthesized
augagcuacugcacuacuggg

SEQ ID NO: 35239 - RNA, 21 nt, artificial
  Chemically synthesized
uguuucagcucuuccaccuac

SEQ ID NO: 35240 - RNA, 21 nt, artificial
  Chemically synthesized
ugucuuucagauacaugguug

SEQ ID NO: 35241 - RNA, 21 nt, artificial
  Chemically synthesized
uuucagauacaugguugugac

SEQ ID NO: 35242 - RNA, 21 nt, artificial
  Chemically synthesized
cuuuggagaagcaaauaggcc

SEQ ID NO: 35243 - RNA, 21 nt, artificial
  Chemically synthesized
acaaauggaggaauaugacgg

SEQ ID NO: 35244 - RNA, 21 nt, artificial
  Chemically synthesized
uuggucaagauuuugaaugcu

SEQ ID NO: 35245 - RNA, 21 nt, artificial
  Chemically synthesized
caaucuugcaacaaccugccc

SEQ ID NO: 35246 - RNA, 21 nt, artificial
  Chemically synthesized
acucaccuaauguuuaugagc

SEQ ID NO: 35247 - RNA, 21 nt, artificial
  Chemically synthesized
guucuacacucaucuuagugc

SEQ ID NO: 35248 - RNA, 21 nt, artificial
  Chemically synthesized
ucaaaaugucuguagcuccuc

SEQ ID NO: 35249 - RNA, 21 nt, artificial
  Chemically synthesized
gucaacguaucugagcucucu

SEQ ID NO: 35250 - RNA, 21 nt, artificial
  Chemically synthesized
aaggacaccuuuuaacucacc

SEQ ID NO: 35251 - RNA, 21 nt, artificial
  Chemically synthesized
auuaugauucuuuguuacagg

SEQ ID NO: 35252 - RNA, 21 nt, artificial
  Chemically synthesized
ucuaaaugcauauccugagcc

SEQ ID NO: 35253 - RNA, 21 nt, artificial
  Chemically synthesized
ggaaucucagacguuuuucgg

SEQ ID NO: 35254 - RNA, 21 nt, artificial
  Chemically synthesized
cucuuccaccuacagaaggag

SEQ ID NO: 35255 - RNA, 21 nt, artificial
  Chemically synthesized
augucuguagcuccucaacuc

SEQ ID NO: 35256 - RNA, 21 nt, artificial
  Chemically synthesized
aacguaucugagcucucucug

SEQ ID NO: 35257 - RNA, 21 nt, artificial
  Chemically synthesized
caaggucuacaugaggaacuc

SEQ ID NO: 35258 - RNA, 21 nt, artificial
  Chemically synthesized
aucuuuggagaagcaaauagg

SEQ ID NO: 35259 - RNA, 21 nt, artificial
  Chemically synthesized
ugguugccuugguaggauugg

SEQ ID NO: 35260 - RNA, 21 nt, artificial
  Chemically synthesized
aggaucuggugaugauggagg

SEQ ID NO: 35261 - RNA, 21 nt, artificial
  Chemically synthesized
auuuauaugucaacguaucug

SEQ ID NO: 35262 - RNA, 21 nt, artificial
  Chemically synthesized
uucccuuagcuauggaaacuc

SEQ ID NO: 35263 - RNA, 21 nt, artificial
  Chemically synthesized
ucaugguucugguugccuugg

SEQ ID NO: 35264 - RNA, 21 nt, artificial
  Chemically synthesized
guuuuucaugguucugguugc

SEQ ID NO: 35265 - RNA, 21 nt, artificial
  Chemically synthesized
gugaucaaugaaacugggcug

SEQ ID NO: 35266 - RNA, 21 nt, artificial
  Chemically synthesized
gguucaaaaugucuguagcuc

SEQ ID NO: 35267 - RNA, 21 nt, artificial
  Chemically synthesized
agugccugagaguauuuaggc

SEQ ID NO: 35268 - RNA, 21 nt, artificial
  Chemically synthesized
aagaagacaugaaccaagugg

SEQ ID NO: 35269 - RNA, 21 nt, artificial
  Chemically synthesized
uaaauauuuauguagaugugc

SEQ ID NO: 35270 - RNA, 21 nt, artificial
  Chemically synthesized
uucaaaaugucuguagcuccu

SEQ ID NO: 35271 - RNA, 21 nt, artificial
  Chemically synthesized
augucaacguaucugagcucu

SEQ ID NO: 35272 - RNA, 21 nt, artificial
  Chemically synthesized
cuuuuaacucaccucucaagg

SEQ ID NO: 35273 - RNA, 21 nt, artificial
  Chemically synthesized
aauuuugaggaaucucagacg

SEQ ID NO: 35274 - RNA, 21 nt, artificial
  Chemically synthesized
cacaaggucuacaugaggaac

SEQ ID NO: 35275 - RNA, 21 nt, artificial
  Chemically synthesized
acacucaucuuagugccugag

SEQ ID NO: 35276 - RNA, 21 nt, artificial
  Chemically synthesized
uuuuugugaaaugaaaacaug

SEQ ID NO: 35277 - RNA, 21 nt, artificial
  Chemically synthesized
auauuaggaaaauauggguug

SEQ ID NO: 35278 - RNA, 21 nt, artificial
  Chemically synthesized
gacaugaaccaaguggaccuu

SEQ ID NO: 35279 - RNA, 21 nt, artificial
  Chemically synthesized
uauuuaggcagauugaaaagg

SEQ ID NO: 35280 - RNA, 21 nt, artificial
  Chemically synthesized
agcagcuaccagguguucuac

SEQ ID NO: 35281 - RNA, 21 nt, artificial
  Chemically synthesized
agcaucuucacuucuaaaugc

SEQ ID NO: 35282 - RNA, 21 nt, artificial
  Chemically synthesized
uaugucaacguaucugagcuc

SEQ ID NO: 35283 - RNA, 21 nt, artificial
  Chemically synthesized
ucaaguaagaagacaugaacc

SEQ ID NO: 35284 - RNA, 21 nt, artificial
  Chemically synthesized
uucuuuguuacaggcaccgag

SEQ ID NO: 35285 - RNA, 21 nt, artificial
  Chemically synthesized
aucaaugaaacugggcuguac

SEQ ID NO: 35286 - RNA, 21 nt, artificial
  Chemically synthesized
aagagagauccagcuugccuc

SEQ ID NO: 35287 - RNA, 21 nt, artificial
  Chemically synthesized
aaccaaguggaccuugagacc

SEQ ID NO: 35288 - RNA, 21 nt, artificial
  Chemically synthesized
aagagaagcacuuugggauuc

SEQ ID NO: 35289 - RNA, 21 nt, artificial
  Chemically synthesized
auauuuauguagaugugcauu

SEQ ID NO: 35290 - RNA, 21 nt, artificial
  Chemically synthesized
gaacauagaacucugggcugc

SEQ ID NO: 35291 - RNA, 21 nt, artificial
  Chemically synthesized
uagugccugagaguauuuagg

SEQ ID NO: 35292 - RNA, 21 nt, artificial
  Chemically synthesized
cucaccuaauguuuaugagcc

SEQ ID NO: 35293 - RNA, 21 nt, artificial
  Chemically synthesized
uuugaggaaucucagacguuu

SEQ ID NO: 35294 - RNA, 21 nt, artificial
  Chemically synthesized
auaagagagauccagcuugcc

SEQ ID NO: 35295 - RNA, 21 nt, artificial
  Chemically synthesized
uuaacucaccucucaaggugg

SEQ ID NO: 35296 - RNA, 21 nt, artificial
  Chemically synthesized
ucuuacaugcauuugagguca

SEQ ID NO: 35297 - RNA, 21 nt, artificial
  Chemically synthesized
uauauuccaaaguauacuucc

SEQ ID NO: 35298 - RNA, 21 nt, artificial
  Chemically synthesized
gucaaucuugcaacaaccugc

SEQ ID NO: 35299 - RNA, 21 nt, artificial
  Chemically synthesized
uccuugugauguuuuucaugg

SEQ ID NO: 35300 - RNA, 21 nt, artificial
  Chemically synthesized
uuucccuuagcuauggaaacu

SEQ ID NO: 35301 - RNA, 21 nt, artificial
  Chemically synthesized
ucuuuggagaagcaaauaggc

SEQ ID NO: 35302 - RNA, 21 nt, artificial
  Chemically synthesized
auuuauguagaugugcauuuu

SEQ ID NO: 35303 - RNA, 21 nt, artificial
  Chemically synthesized
aacauagaacucugggcugcc

SEQ ID NO: 35304 - RNA, 21 nt, artificial
  Chemically synthesized
ucuuucagauacaugguugug

SEQ ID NO: 35305 - RNA, 21 nt, artificial
  Chemically synthesized
uucaugguucugguugccuug

SEQ ID NO: 35306 - RNA, 21 nt, artificial
  Chemically synthesized
aaaaaucauugauugucagcu

SEQ ID NO: 35307 - RNA, 21 nt, artificial
  Chemically synthesized
uauuccaaaguauacuuccgg

SEQ ID NO: 35308 - RNA, 21 nt, artificial
  Chemically synthesized
aggcagauugaaaaggacacc

SEQ ID NO: 35309 - RNA, 21 nt, artificial
  Chemically synthesized
ucuuuccauuaugauucuuug

SEQ ID NO: 35310 - RNA, 21 nt, artificial
  Chemically synthesized
ugcuuccugacaaucaacucu

SEQ ID NO: 35311 - RNA, 21 nt, artificial
  Chemically synthesized
uguaacaaagaaucauaaugg

SEQ ID NO: 35312 - RNA, 21 nt, artificial
  Chemically synthesized
uucauuucacaaaaaugcaca

SEQ ID NO: 35313 - RNA, 21 nt, artificial
  Chemically synthesized
uucacaauaucuacauucucu

SEQ ID NO: 35314 - RNA, 21 nt, artificial
  Chemically synthesized
uuuccaucccuuaaauccuca

SEQ ID NO: 35315 - RNA, 21 nt, artificial
  Chemically synthesized
uuucauuucacaaaaaugcac

SEQ ID NO: 35316 - RNA, 21 nt, artificial
  Chemically synthesized
uuuuaagcacuauuagaguug

SEQ ID NO: 35317 - RNA, 21 nt, artificial
  Chemically synthesized
uuuuuaagcacuauuagaguu

SEQ ID NO: 35318 - RNA, 21 nt, artificial
  Chemically synthesized
uacuucacaauaucuacauuc

SEQ ID NO: 35319 - RNA, 21 nt, artificial
  Chemically synthesized
uuuucauuucacaaaaaugca

SEQ ID NO: 35320 - RNA, 21 nt, artificial
  Chemically synthesized
uauuacauguuuucauuucac

SEQ ID NO: 35321 - RNA, 21 nt, artificial
  Chemically synthesized
uauacuuuggaauauacaaag

SEQ ID NO: 35322 - RNA, 21 nt, artificial
  Chemically synthesized
augauuuuuaagcacuauuag

SEQ ID NO: 35323 - RNA, 21 nt, artificial
  Chemically synthesized
auuuuuaagcacuauuagagu

SEQ ID NO: 35324 - RNA, 21 nt, artificial
  Chemically synthesized
uuuuccuaauauguacuucac

SEQ ID NO: 35325 - RNA, 21 nt, artificial
  Chemically synthesized
uauguacuucacaauaucuac

SEQ ID NO: 35326 - RNA, 21 nt, artificial
  Chemically synthesized
uuccuaauauguacuucacaa

SEQ ID NO: 35327 - RNA, 21 nt, artificial
  Chemically synthesized
uugacauauaaaugaucagca

SEQ ID NO: 35328 - RNA, 21 nt, artificial
  Chemically synthesized
uuuucaaucugccuaaauacu

SEQ ID NO: 35329 - RNA, 21 nt, artificial
  Chemically synthesized
uuuggaauauacaaaguacag

SEQ ID NO: 35330 - RNA, 21 nt, artificial
  Chemically synthesized
uaauauguacuucacaauauc

SEQ ID NO: 35331 - RNA, 21 nt, artificial
  Chemically synthesized
auguacuucacaauaucuaca

SEQ ID NO: 35332 - RNA, 21 nt, artificial
  Chemically synthesized
uauuuuccuaauauguacuuc

SEQ ID NO: 35333 - RNA, 21 nt, artificial
  Chemically synthesized
auaggaaaacaucauuaguag

SEQ ID NO: 35334 - RNA, 21 nt, artificial
  Chemically synthesized
uuacauguuuucauuucacaa

SEQ ID NO: 35335 - RNA, 21 nt, artificial
  Chemically synthesized
uuauaggaaaacaucauuagu

SEQ ID NO: 35336 - RNA, 21 nt, artificial
  Chemically synthesized
uguacuucacaauaucuacau

SEQ ID NO: 35337 - RNA, 21 nt, artificial
  Chemically synthesized
uccaucccuuaaauccucagg

SEQ ID NO: 35338 - RNA, 21 nt, artificial
  Chemically synthesized
agauacguugacauauaaaug

SEQ ID NO: 35339 - RNA, 21 nt, artificial
  Chemically synthesized
auuauaggaaaacaucauuag

SEQ ID NO: 35340 - RNA, 21 nt, artificial
  Chemically synthesized
uucucuuagagcuuauauaag

SEQ ID NO: 35341 - RNA, 21 nt, artificial
  Chemically synthesized
uuuccuaauauguacuucaca

SEQ ID NO: 35342 - RNA, 21 nt, artificial
  Chemically synthesized
acaauaucuacauucucucuu

SEQ ID NO: 35343 - RNA, 21 nt, artificial
  Chemically synthesized
uauaggaaaacaucauuagua

SEQ ID NO: 35344 - RNA, 21 nt, artificial
  Chemically synthesized
uuucacaaaaaugcacaucua

SEQ ID NO: 35345 - RNA, 21 nt, artificial
  Chemically synthesized
uuuaagcacuauuagaguuga

SEQ ID NO: 35346 - RNA, 21 nt, artificial
  Chemically synthesized
auauguacuucacaauaucua

SEQ ID NO: 35347 - RNA, 21 nt, artificial
  Chemically synthesized
ugauuuuuaagcacuauuaga

SEQ ID NO: 35348 - RNA, 21 nt, artificial
  Chemically synthesized
auuacauguuuucauuucaca

SEQ ID NO: 35349 - RNA, 21 nt, artificial
  Chemically synthesized
uuaaaagguguccuuuucaau

SEQ ID NO: 35350 - RNA, 21 nt, artificial
  Chemically synthesized
aauauguacuucacaauaucu

SEQ ID NO: 35351 - RNA, 21 nt, artificial
  Chemically synthesized
guuuucauuucacaaaaaugc

SEQ ID NO: 35352 - RNA, 21 nt, artificial
  Chemically synthesized
ucugccuaaauacucucaggc

SEQ ID NO: 35353 - RNA, 21 nt, artificial
  Chemically synthesized
uuauagaguuuccauagcuaa

SEQ ID NO: 35354 - RNA, 21 nt, artificial
  Chemically synthesized
auucaaaaucuugaccaaaug

SEQ ID NO: 35355 - RNA, 21 nt, artificial
  Chemically synthesized
auuucacaaaaaugcacaucu

SEQ ID NO: 35356 - RNA, 21 nt, artificial
  Chemically synthesized
uacuuagaguuccucauguag

SEQ ID NO: 35357 - RNA, 21 nt, artificial
  Chemically synthesized
uacguugacauauaaaugauc

SEQ ID NO: 35358 - RNA, 21 nt, artificial
  Chemically synthesized
auaucuacauucucucuuuag

SEQ ID NO: 35359 - RNA, 21 nt, artificial
  Chemically synthesized
auaugcauuuagaagugaaga

SEQ ID NO: 35360 - RNA, 21 nt, artificial
  Chemically synthesized
aaucaaugauuuuuaagcacu

SEQ ID NO: 35361 - RNA, 21 nt, artificial
  Chemically synthesized
uguuuucauuucacaaaaaug

SEQ ID NO: 35362 - RNA, 21 nt, artificial
  Chemically synthesized
agccucuuuagcuuauuaugc

SEQ ID NO: 35363 - RNA, 21 nt, artificial
  Chemically synthesized
agcaggacaauuccauaggug

SEQ ID NO: 35364 - RNA, 21 nt, artificial
  Chemically synthesized
acauguuuucauuucacaaaa

SEQ ID NO: 35365 - RNA, 21 nt, artificial
  Chemically synthesized
acaaucaaugauuuuuaagca

SEQ ID NO: 35366 - RNA, 21 nt, artificial
  Chemically synthesized
ugcacaucuacauaaauauuu

SEQ ID NO: 35367 - RNA, 21 nt, artificial
  Chemically synthesized
gauuuuuaagcacuauuagag

SEQ ID NO: 35368 - RNA, 21 nt, artificial
  Chemically synthesized
cuaagaugaguguagaacacc

SEQ ID NO: 35369 - RNA, 21 nt, artificial
  Chemically synthesized
aauaucuacauucucucuuua

SEQ ID NO: 35370 - RNA, 21 nt, artificial
  Chemically synthesized
acguugacauauaaaugauca

SEQ ID NO: 35371 - RNA, 21 nt, artificial
  Chemically synthesized
acaaagaaucauaauggaaag

SEQ ID NO: 35372 - RNA, 21 nt, artificial
  Chemically synthesized
aaauccucaggucacaaccau

SEQ ID NO: 35373 - RNA, 21 nt, artificial
  Chemically synthesized
auuuuccuaauauguacuuca

SEQ ID NO: 35374 - RNA, 21 nt, artificial
  Chemically synthesized
acaaaaaugcacaucuacaua

SEQ ID NO: 35375 - RNA, 21 nt, artificial
  Chemically synthesized
uacauguuuucauuucacaaa

SEQ ID NO: 35376 - RNA, 21 nt, artificial
  Chemically synthesized
uggaaagaaucccaaagugcu

SEQ ID NO: 35377 - RNA, 21 nt, artificial
  Chemically synthesized
uaacaaagaaucauaauggaa

SEQ ID NO: 35378 - RNA, 21 nt, artificial
  Chemically synthesized
augcacaucuacauaaauauu

SEQ ID NO: 35379 - RNA, 21 nt, artificial
  Chemically synthesized
auacguugacauauaaaugau

SEQ ID NO: 35380 - RNA, 21 nt, artificial
  Chemically synthesized
agaggcauggaccuugaguug

SEQ ID NO: 35381 - RNA, 21 nt, artificial
  Chemically synthesized
agaaucauaauggaaagaauc

SEQ ID NO: 35382 - RNA, 21 nt, artificial
  Chemically synthesized
ccauauuuuccuaauauguac

SEQ ID NO: 35383 - RNA, 21 nt, artificial
  Chemically synthesized
uggaucucucuuauagaguuu

SEQ ID NO: 35384 - RNA, 21 nt, artificial
  Chemically synthesized
agcuacagacauuuugaaccc

SEQ ID NO: 35385 - RNA, 21 nt, artificial
  Chemically synthesized
cuuuuccaucccuuaaauccu

SEQ ID NO: 35386 - RNA, 21 nt, artificial
  Chemically synthesized
cucaaaauugaccagagagag

SEQ ID NO: 35387 - RNA, 21 nt, artificial
  Chemically synthesized
acuaagaugaguguagaacac

SEQ ID NO: 35388 - RNA, 21 nt, artificial
  Chemically synthesized
uaucuacauucucucuuuagu

SEQ ID NO: 35389 - RNA, 21 nt, artificial
  Chemically synthesized
auauaaaugaucagcacuggu

SEQ ID NO: 35390 - RNA, 21 nt, artificial
  Chemically synthesized
cauagcuaagggaaacaccuc

SEQ ID NO: 35391 - RNA, 21 nt, artificial
  Chemically synthesized
aacauuaggugaguugaggag

SEQ ID NO: 35392 - RNA, 21 nt, artificial
  Chemically synthesized
cucuuagagcuuauauaagcc

SEQ ID NO: 35393 - RNA, 21 nt, artificial
  Chemically synthesized
ccauguaucugaaagacaguc

SEQ ID NO: 35394 - RNA, 21 nt, artificial
  Chemically synthesized
uuaagcacuauuagaguugau

SEQ ID NO: 35395 - RNA, 21 nt, artificial
  Chemically synthesized
acccauauuuuccuaauaugu

SEQ ID NO: 35396 - RNA, 21 nt, artificial
  Chemically synthesized
ccuuuuccaucccuuaaaucc

SEQ ID NO: 35397 - RNA, 21 nt, artificial
  Chemically synthesized
cuacagacauuuugaacccug

SEQ ID NO: 35398 - RNA, 21 nt, artificial
  Chemically synthesized
guguuaggaaugaaaugaguc

SEQ ID NO: 35399 - RNA, 21 nt, artificial
  Chemically synthesized
ccuguugcugacugcucaaga

SEQ ID NO: 35400 - RNA, 21 nt, artificial
  Chemically synthesized
ccuaauauguacuucacaaua

SEQ ID NO: 35401 - RNA, 21 nt, artificial
  Chemically synthesized
aucaaugauuuuuaagcacua

SEQ ID NO: 35402 - RNA, 21 nt, artificial
  Chemically synthesized
agucuuccuuuuccaucccuu

SEQ ID NO: 35403 - RNA, 21 nt, artificial
  Chemically synthesized
cauauuuuccuaauauguacu

SEQ ID NO: 35404 - RNA, 21 nt, artificial
  Chemically synthesized
acuuuggaauauacaaaguac

SEQ ID NO: 35405 - RNA, 21 nt, artificial
  Chemically synthesized
aaauugaccagagagagcuca

SEQ ID NO: 35406 - RNA, 21 nt, artificial
  Chemically synthesized
ugaguuaaaagguguccuuuu

SEQ ID NO: 35407 - RNA, 21 nt, artificial
  Chemically synthesized
acugaauacaacauucucggu

SEQ ID NO: 35408 - RNA, 21 nt, artificial
  Chemically synthesized
gcuuauauaagccgaaaaacg

SEQ ID NO: 35409 - RNA, 21 nt, artificial
  Chemically synthesized
agguggaagagcugaaacauc

SEQ ID NO: 35410 - RNA, 21 nt, artificial
  Chemically synthesized
auacuuuggaauauacaaagu

SEQ ID NO: 35411 - RNA, 21 nt, artificial
  Chemically synthesized
acaucugcccaguagugcagu

SEQ ID NO: 35412 - RNA, 21 nt, artificial
  Chemically synthesized
cauauuccuccauuugucugg

SEQ ID NO: 35413 - RNA, 21 nt, artificial
  Chemically synthesized
caauaucuacauucucucuuu

SEQ ID NO: 35414 - RNA, 21 nt, artificial
  Chemically synthesized
ugccuaaauacucucaggcac

SEQ ID NO: 35415 - RNA, 21 nt, artificial
  Chemically synthesized
cuacauucucucuuuagucau

SEQ ID NO: 35416 - RNA, 21 nt, artificial
  Chemically synthesized
cuccagaaagcaggacaauuc

SEQ ID NO: 35417 - RNA, 21 nt, artificial
  Chemically synthesized
gaauauacaaaguacagccca

SEQ ID NO: 35418 - RNA, 21 nt, artificial
  Chemically synthesized
aaguauacuuuggaauauaca

SEQ ID NO: 35419 - RNA, 21 nt, artificial
  Chemically synthesized
aacaaagaaucauaauggaaa

SEQ ID NO: 35420 - RNA, 21 nt, artificial
  Chemically synthesized
cuucucuuagagcuuauauaa

SEQ ID NO: 35421 - RNA, 21 nt, artificial
  Chemically synthesized
agguguccuuuucaaucugcc

SEQ ID NO: 35422 - RNA, 21 nt, artificial
  Chemically synthesized
aauauacaaaguacagcccag

SEQ ID NO: 35423 - RNA, 21 nt, artificial
  Chemically synthesized
cugguaagauugaacacugcc

SEQ ID NO: 35424 - RNA, 21 nt, artificial
  Chemically synthesized
ccuucuuauacuucacuccag

SEQ ID NO: 35425 - RNA, 21 nt, artificial
  Chemically synthesized
caggucacaaccauguaucug

SEQ ID NO: 35426 - RNA, 21 nt, artificial
  Chemically synthesized
ucuguagguggaagagcugaa

SEQ ID NO: 35427 - RNA, 21 nt, artificial
  Chemically synthesized
aggaaaacaucauuaguagcu

SEQ ID NO: 35428 - RNA, 21 nt, artificial
  Chemically synthesized
gucugagauuccucaaaauug

SEQ ID NO: 35429 - RNA, 21 nt, artificial
  Chemically synthesized
ugacaaucaaugauuuuuaag

SEQ ID NO: 35430 - RNA, 21 nt, artificial
  Chemically synthesized
cuguaacaaagaaucauaaug

SEQ ID NO: 35431 - RNA, 21 nt, artificial
  Chemically synthesized
gcccaguuucauugaucacaa

SEQ ID NO: 35432 - RNA, 21 nt, artificial
  Chemically synthesized
cccaaaacaucucucuugcuu

SEQ ID NO: 35433 - RNA, 21 nt, artificial
  Chemically synthesized
ugcuucuccaaagaugaugcu

SEQ ID NO: 35434 - RNA, 21 nt, artificial
  Chemically synthesized
aagugcuucucuuagagcuua

SEQ ID NO: 35435 - RNA, 21 nt, artificial
  Chemically synthesized
caguagugcaguagcucauca

SEQ ID NO: 35436 - RNA, 21 nt, artificial
  Chemically synthesized
ggaauauacaaaguacagccc

SEQ ID NO: 35437 - RNA, 21 nt, artificial
  Chemically synthesized
ccuucuguagguggaagagcu

SEQ ID NO: 35438 - RNA, 21 nt, artificial
  Chemically synthesized
ucaaugauuuuuaagcacuau

SEQ ID NO: 35439 - RNA, 21 nt, artificial
  Chemically synthesized
auuaggugaguugaggagcua

SEQ ID NO: 35440 - RNA, 21 nt, artificial
  Chemically synthesized
guguccuuuucaaucugccua

SEQ ID NO: 35441 - RNA, 21 nt, artificial
  Chemically synthesized
ccuuaaauccucaggucacaa

SEQ ID NO: 35442 - RNA, 21 nt, artificial
  Chemically synthesized
acugcuguccacccaguagau

SEQ ID NO: 35443 - RNA, 21 nt, artificial
  Chemically synthesized
aggacaauuccauaggugucu

SEQ ID NO: 35444 - RNA, 21 nt, artificial
  Chemically synthesized
cuuagaguuccucauguagac

SEQ ID NO: 35445 - RNA, 21 nt, artificial
  Chemically synthesized
uuucagccucuuuagcuuauu

SEQ ID NO: 35446 - RNA, 21 nt, artificial
  Chemically synthesized
agacauuuugaacccuguggu

SEQ ID NO: 35447 - RNA, 21 nt, artificial
  Chemically synthesized
ccaaaugcaacccauauuuuc

SEQ ID NO: 35448 - RNA, 21 nt, artificial
  Chemically synthesized
uccuaauauguacuucacaau

SEQ ID NO: 35449 - RNA, 21 nt, artificial
  Chemically synthesized
cauuucacaaaaaugcacauc

SEQ ID NO: 35450 - RNA, 21 nt, artificial
  Chemically synthesized
gaucucucuuauagaguuucc

SEQ ID NO: 35451 - RNA, 21 nt, artificial
  Chemically synthesized
ucuucccauuccagaggcaug

SEQ ID NO: 35452 - RNA, 21 nt, artificial
  Chemically synthesized
caucccuuaaauccucagguc

SEQ ID NO: 35453 - RNA, 21 nt, artificial
  Chemically synthesized
caugaaaaacaucacaaggag

SEQ ID NO: 35454 - RNA, 21 nt, artificial
  Chemically synthesized
aaaacaucauuaguagcugac

SEQ ID NO: 35455 - RNA, 21 nt, artificial
  Chemically synthesized
cuucuguagguggaagagcug

SEQ ID NO: 35456 - RNA, 21 nt, artificial
  Chemically synthesized
ucaggcacuaagaugagugua

SEQ ID NO: 35457 - RNA, 21 nt, artificial
  Chemically synthesized
ucagauacguugacauauaaa

SEQ ID NO: 35458 - RNA, 21 nt, artificial
  Chemically synthesized
guggaagagcugaaacauccc

SEQ ID NO: 35459 - RNA, 21 nt, artificial
  Chemically synthesized
ucucggugccuguaacaaaga

SEQ ID NO: 35460 - RNA, 21 nt, artificial
  Chemically synthesized
ugaccaaaugcaacccauauu

SEQ ID NO: 35461 - RNA, 21 nt, artificial
  Chemically synthesized
aagaagacccucacugaauac

SEQ ID NO: 35462 - RNA, 21 nt, artificial
  Chemically synthesized
guuuuacuucuucucaguccu

SEQ ID NO: 35463 - RNA, 21 nt, artificial
  Chemically synthesized
agguccacuugguucaugucu

SEQ ID NO: 35464 - RNA, 21 nt, artificial
  Chemically synthesized
aaagaaucauaauggaaagaa

SEQ ID NO: 35465 - RNA, 21 nt, artificial
  Chemically synthesized
ugauugucaggaagcauucaa

SEQ ID NO: 35466 - RNA, 21 nt, artificial
  Chemically synthesized
aucugcccaguagugcaguag

SEQ ID NO: 35467 - RNA, 21 nt, artificial
  Chemically synthesized
caucucucuugcuuaucuguu

SEQ ID NO: 35468 - RNA, 21 nt, artificial
  Chemically synthesized
gcaguagcucaucaucuuccc

SEQ ID NO: 35469 - RNA, 21 nt, artificial
  Chemically synthesized
ggauacuuagaguuccucaug

SEQ ID NO: 35470 - RNA, 21 nt, artificial
  Chemically synthesized
gugaguuaaaagguguccuuu

SEQ ID NO: 35471 - RNA, 21 nt, artificial
  Chemically synthesized
agcuggaucucucuuauagag

SEQ ID NO: 35472 - RNA, 21 nt, artificial
  Chemically synthesized
guuggacuugccuguuaaaug

SEQ ID NO: 35473 - RNA, 21 nt, artificial
  Chemically synthesized
guuuccauagcuaagggaaac

SEQ ID NO: 35474 - RNA, 21 nt, artificial
  Chemically synthesized
acucucaggcacuaagaugag

SEQ ID NO: 35475 - RNA, 21 nt, artificial
  Chemically synthesized
agcccaguuucauugaucaca

SEQ ID NO: 35476 - RNA, 21 nt, artificial
  Chemically synthesized
cauaggugucuucccauucca

SEQ ID NO: 35477 - RNA, 21 nt, artificial
  Chemically synthesized
ucagcacugguaagauugaac

SEQ ID NO: 35478 - RNA, 21 nt, artificial
  Chemically synthesized
aaccaugaaaaacaucacaag

SEQ ID NO: 35479 - RNA, 21 nt, artificial
  Chemically synthesized
ccagcaaacgguuuuacuucu

SEQ ID NO: 35480 - RNA, 21 nt, artificial
  Chemically synthesized
gagagcucagauacguugaca

SEQ ID NO: 35481 - RNA, 21 nt, artificial
  Chemically synthesized
ccucuuucagccucuuuagcu

SEQ ID NO: 35482 - RNA, 21 nt, artificial
  Chemically synthesized
caaagugcuucucuuagagcu

SEQ ID NO: 35483 - RNA, 21 nt, artificial
  Chemically synthesized
ucauuucacaaaaaugcacau

SEQ ID NO: 35484 - RNA, 21 nt, artificial
  Chemically synthesized
ccaaagugcuucucuuagagc

SEQ ID NO: 35485 - RNA, 21 nt, artificial
  Chemically synthesized
caauccuaccaaggcaaccag

SEQ ID NO: 35486 - RNA, 21 nt, artificial
  Chemically synthesized
aacccauauuuuccuaauaug

SEQ ID NO: 35487 - RNA, 21 nt, artificial
  Chemically synthesized
uacuuuggaauauacaaagua

SEQ ID NO: 35488 - RNA, 21 nt, artificial
  Chemically synthesized
cuaauauguacuucacaauau

SEQ ID NO: 35489 - RNA, 21 nt, artificial
  Chemically synthesized
cucuuauagaguuuccauagc

SEQ ID NO: 35490 - RNA, 21 nt, artificial
  Chemically synthesized
ugguagcugcuuuuucaugcu

SEQ ID NO: 35491 - RNA, 21 nt, artificial
  Chemically synthesized
uagcugcuuuuucaugcuucu

SEQ ID NO: 35492 - RNA, 21 nt, artificial
  Chemically synthesized
aucucucuuauagaguuucca

SEQ ID NO: 35493 - RNA, 21 nt, artificial
  Chemically synthesized
agcugcuuuuucaugcuucuc

SEQ ID NO: 35494 - RNA, 21 nt, artificial
  Chemically synthesized
uccuaccaaggcaaccagaac

SEQ ID NO: 35495 - RNA, 21 nt, artificial
  Chemically synthesized
cauuuugaacccuguggucuc

SEQ ID NO: 35496 - RNA, 21 nt, artificial
  Chemically synthesized
gugcaguagcucaucaucuuc

SEQ ID NO: 35497 - RNA, 21 nt, artificial
  Chemically synthesized
aaaugcacaucuacauaaaua

SEQ ID NO: 35498 - RNA, 21 nt, artificial
  Chemically synthesized
cucucuuauagaguuuccaua

SEQ ID NO: 35499 - RNA, 21 nt, artificial
  Chemically synthesized
cuucucaguccuguagaggcu

SEQ ID NO: 35500 - RNA, 21 nt, artificial
  Chemically synthesized
cacuaagaugaguguagaaca

SEQ ID NO: 35501 - RNA, 21 nt, artificial
  Chemically synthesized
cuuauagaguuuccauagcua

SEQ ID NO: 35502 - RNA, 21 nt, artificial
  Chemically synthesized
auacuuagaguuccucaugua

SEQ ID NO: 35503 - RNA, 21 nt, artificial
  Chemically synthesized
ugucuucuuacuugaccucaa

SEQ ID NO: 35504 - RNA, 21 nt, artificial
  Chemically synthesized
caaucugccuaaauacucuca

SEQ ID NO: 35505 - RNA, 21 nt, artificial
  Chemically synthesized
uaagcacuauuagaguugauu

SEQ ID NO: 35506 - RNA, 21 nt, artificial
  Chemically synthesized
agaaagcaggacaauuccaua

SEQ ID NO: 35507 - RNA, 21 nt, artificial
  Chemically synthesized
aaaaaugcacaucuacauaaa

SEQ ID NO: 35508 - RNA, 21 nt, artificial
  Chemically synthesized
acagacauuuugaacccugug

SEQ ID NO: 35509 - RNA, 21 nt, artificial
  Chemically synthesized
gauacuuagaguuccucaugu

SEQ ID NO: 35510 - RNA, 21 nt, artificial
  Chemically synthesized
agcuccuucuguagguggaag

SEQ ID NO: 35511 - RNA, 21 nt, artificial
  Chemically synthesized
cauuaggugaguugaggagcu

SEQ ID NO: 35512 - RNA, 21 nt, artificial
  Chemically synthesized
cacuauuagaguugauuguca

SEQ ID NO: 35513 - RNA, 21 nt, artificial
  Chemically synthesized
guagugcaguagcucaucauc

SEQ ID NO: 35514 - RNA, 21 nt, artificial
  Chemically synthesized
cugagauuccucaaaauugac

SEQ ID NO: 35515 - RNA, 21 nt, artificial
  Chemically synthesized
cagaaagcaggacaauuccau

SEQ ID NO: 35516 - RNA, 21 nt, artificial
  Chemically synthesized
acaaaguacagcccaguuuca

SEQ ID NO: 35517 - RNA, 21 nt, artificial
  Chemically synthesized
guguagaacaccugguagcug

SEQ ID NO: 35518 - RNA, 21 nt, artificial
  Chemically synthesized
gaaagcaggacaauuccauag

SEQ ID NO: 35519 - RNA, 21 nt, artificial
  Chemically synthesized
aaaacgucugagauuccucaa

SEQ ID NO: 35520 - RNA, 21 nt, artificial
  Chemically synthesized
aggucacaaccauguaucuga

SEQ ID NO: 35521 - RNA, 21 nt, artificial
  Chemically synthesized
aagacccucacugaauacaac

SEQ ID NO: 35522 - RNA, 21 nt, artificial
  Chemically synthesized
guuaaaagguguccuuuucaa

SEQ ID NO: 35523 - RNA, 21 nt, artificial
  Chemically synthesized
aguguagaacaccugguagcu

SEQ ID NO: 35524 - RNA, 21 nt, artificial
  Chemically synthesized
uuagagcuuauauaagccgaa

SEQ ID NO: 35525 - RNA, 21 nt, artificial
  Chemically synthesized
uaugcauuuagaagugaagau

SEQ ID NO: 35526 - RNA, 21 nt, artificial
  Chemically synthesized
cuugaccucaaaugcauguaa

SEQ ID NO: 35527 - RNA, 21 nt, artificial
  Chemically synthesized
ucagccucuuuagcuuauuau

SEQ ID NO: 35528 - RNA, 21 nt, artificial
  Chemically synthesized
acuucacuccagaaagcagga

SEQ ID NO: 35529 - RNA, 21 nt, artificial
  Chemically synthesized
uacagacauuuugaacccugu

SEQ ID NO: 35530 - RNA, 21 nt, artificial
  Chemically synthesized
caaaugcauguaagaagaccc

SEQ ID NO: 35531 - RNA, 21 nt, artificial
  Chemically synthesized
uuccucaaaauugaccagaga

SEQ ID NO: 35532 - RNA, 21 nt, artificial
  Chemically synthesized
cccaaagugcuucucuuagag

SEQ ID NO: 35533 - RNA, 21 nt, artificial
  Chemically synthesized
aaaguacagcccaguuucauu

SEQ ID NO: 35534 - RNA, 21 nt, artificial
  Chemically synthesized
gugguucccucucuucuucag

SEQ ID NO: 35535 - RNA, 21 nt, artificial
  Chemically synthesized
ccauagcuaagggaaacaccu

SEQ ID NO: 35536 - RNA, 21 nt, artificial
  Chemically synthesized
cuugcuuaucuguuaguuuca

SEQ ID NO: 35537 - RNA, 21 nt, artificial
  Chemically synthesized
aggugucuucccauuccagag

SEQ ID NO: 35538 - RNA, 21 nt, artificial
  Chemically synthesized
cacuugguucaugucuucuua

SEQ ID NO: 35539 - RNA, 21 nt, artificial
  Chemically synthesized
cuguugcugacugcucaagag

SEQ ID NO: 35540 - RNA, 21 nt, artificial
  Chemically synthesized
cauuuagaagugaagaugcug

SEQ ID NO: 35541 - RNA, 21 nt, artificial
  Chemically synthesized
acuucacaauaucuacauucu

SEQ ID NO: 35542 - RNA, 21 nt, artificial
  Chemically synthesized
accauguaucugaaagacagu

SEQ ID NO: 35543 - RNA, 21 nt, artificial
  Chemically synthesized
guugcugacugcucaagagga

SEQ ID NO: 35544 - RNA, 21 nt, artificial
  Chemically synthesized
cucuuucagccucuuuagcuu

SEQ ID NO: 35545 - RNA, 21 nt, artificial
  Chemically synthesized
aguuggacuugccuguuaaau

SEQ ID NO: 35546 - RNA, 21 nt, artificial
  Chemically synthesized
ccaguagugcaguagcucauc

SEQ ID NO: 35547 - RNA, 21 nt, artificial
  Chemically synthesized
guaacaaagaaucauaaugga

SEQ ID NO: 35548 - RNA, 21 nt, artificial
  Chemically synthesized
auuugcuucuccaaagaugau

SEQ ID NO: 35549 - RNA, 21 nt, artificial
  Chemically synthesized
uggucucaagguccacuuggu

SEQ ID NO: 35550 - RNA, 21 nt, artificial
  Chemically synthesized
cuuccuuuuccaucccuuaaa

SEQ ID NO: 35551 - RNA, 21 nt, artificial
  Chemically synthesized
ggacaauuccauaggugucuu

SEQ ID NO: 35552 - RNA, 21 nt, artificial
  Chemically synthesized
ucacuccagaaagcaggacaa

SEQ ID NO: 35553 - RNA, 21 nt, artificial
  Chemically synthesized
ucaagaggaggcaagcuggau

SEQ ID NO: 35554 - RNA, 21 nt, artificial
  Chemically synthesized
caccugguagcugcuuuuuca

SEQ ID NO: 35555 - RNA, 21 nt, artificial
  Chemically synthesized
cuuuagcuuauuaugcaagcc

SEQ ID NO: 35556 - RNA, 21 nt, artificial
  Chemically synthesized
augcaacccauauuuuccuaa

SEQ ID NO: 35557 - RNA, 21 nt, artificial
  Chemically synthesized
ggaaaacaucauuaguagcug

SEQ ID NO: 35558 - RNA, 21 nt, artificial
  Chemically synthesized
accagagagagcucagauacg

SEQ ID NO: 35559 - RNA, 21 nt, artificial
  Chemically synthesized
agaacaccugguagcugcuuu

SEQ ID NO: 35560 - RNA, 21 nt, artificial
  Chemically synthesized
gcacuauuagaguugauuguc

SEQ ID NO: 35561 - RNA, 21 nt, artificial
  Chemically synthesized
gaaaaacgucugagauuccuc

SEQ ID NO: 35562 - RNA, 21 nt, artificial
  Chemically synthesized
cagaguucuauguucuuccgu

SEQ ID NO: 35563 - RNA, 21 nt, artificial
  Chemically synthesized
gacuugccuguuaaaugggcc

SEQ ID NO: 35564 - RNA, 21 nt, artificial
  Chemically synthesized
cuucuccaaagaugaugcugu

SEQ ID NO: 35565 - RNA, 21 nt, artificial
  Chemically synthesized
caaaaucuugaccaaaugcaa

SEQ ID NO: 35566 - RNA, 21 nt, artificial
  Chemically synthesized
cuucacuccagaaagcaggac

SEQ ID NO: 35567 - RNA, 21 nt, artificial
  Chemically synthesized
aagaaucauaauggaaagaau

SEQ ID NO: 35568 - RNA, 21 nt, artificial
  Chemically synthesized
caugucuucuuacuugaccuc

SEQ ID NO: 35569 - RNA, 21 nt, artificial
  Chemically synthesized
ccuugaguuggacuugccugu

SEQ ID NO: 35570 - RNA, 21 nt, artificial
  Chemically synthesized
ggucacaaccauguaucugaa

SEQ ID NO: 35571 - RNA, 21 nt, artificial
  Chemically synthesized
guauacuuuggaauauacaaa

SEQ ID NO: 35572 - RNA, 21 nt, artificial
  Chemically synthesized
cucauaaacauuaggugaguu

SEQ ID NO: 35573 - RNA, 21 nt, artificial
  Chemically synthesized
acauucucggugccuguaaca

SEQ ID NO: 35574 - RNA, 21 nt, artificial
  Chemically synthesized
guaagaagacccucacugaau

SEQ ID NO: 35575 - RNA, 21 nt, artificial
  Chemically synthesized
caggaagcauucaaaaucuug

SEQ ID NO: 35576 - RNA, 21 nt, artificial
  Chemically synthesized
uagaggcugaggugucaagga

SEQ ID NO: 35577 - RNA, 21 nt, artificial
  Chemically synthesized
aguauacuuuggaauauacaa

SEQ ID NO: 35578 - RNA, 21 nt, artificial
  Chemically synthesized
ccagaaagcaggacaauucca

SEQ ID NO: 35579 - RNA, 21 nt, artificial
  Chemically synthesized
gacauuuugaacccugugguc

SEQ ID NO: 35580 - RNA, 21 nt, artificial
  Chemically synthesized
caaugauuuuuaagcacuauu

SEQ ID NO: 35581 - RNA, 21 nt, artificial
  Chemically synthesized
gcaagccucuagucuuccuuu

SEQ ID NO: 35582 - RNA, 21 nt, artificial
  Chemically synthesized
gcuuauuaugcaagccucuag

SEQ ID NO: 35583 - RNA, 21 nt, artificial
  Chemically synthesized
aguucuauguucuuccgucau

SEQ ID NO: 35584 - RNA, 21 nt, artificial
  Chemically synthesized
cagcaaacgguuuuacuucuu

SEQ ID NO: 35585 - RNA, 21 nt, artificial
  Chemically synthesized
acaucucucuugcuuaucugu

SEQ ID NO: 35586 - RNA, 21 nt, artificial
  Chemically synthesized
ggacuugccuguuaaaugggc

SEQ ID NO: 35587 - RNA, 21 nt, artificial
  Chemically synthesized
aaacaucauuaguagcugaca

SEQ ID NO: 35588 - RNA, 21 nt, artificial
  Chemically synthesized
ccucagcuccuuuuuuucagg

SEQ ID NO: 35589 - RNA, 21 nt, artificial
  Chemically synthesized
gagauuccucaaaauugacca

SEQ ID NO: 35590 - RNA, 21 nt, artificial
  Chemically synthesized
caaucaaugauuuuuaagcac

SEQ ID NO: 35591 - RNA, 21 nt, artificial
  Chemically synthesized
aaugaucagcacugguaagau

SEQ ID NO: 35592 - RNA, 21 nt, artificial
  Chemically synthesized
agcuuauauaagccgaaaaac

SEQ ID NO: 35593 - RNA, 21 nt, artificial
  Chemically synthesized
aaggcaaccagaaccaugaaa

SEQ ID NO: 35594 - RNA, 21 nt, artificial
  Chemically synthesized
acuccagaaagcaggacaauu

SEQ ID NO: 35595 - RNA, 21 nt, artificial
  Chemically synthesized
aggcaaccagaaccaugaaaa

SEQ ID NO: 35596 - RNA, 21 nt, artificial
  Chemically synthesized
aguagugcaguagcucaucau

SEQ ID NO: 35597 - RNA, 21 nt, artificial
  Chemically synthesized
agaguuuccauagcuaaggga

SEQ ID NO: 35598 - RNA, 21 nt, artificial
  Chemically synthesized
aaucccaaagugcuucucuua

SEQ ID NO: 35599 - RNA, 21 nt, artificial
  Chemically synthesized
ggaagcauucaaaaucuugac

SEQ ID NO: 35600 - RNA, 21 nt, artificial
  Chemically synthesized
guaauugaagggcugcugcau

SEQ ID NO: 35601 - RNA, 21 nt, artificial
  Chemically synthesized
cauaauggaaagaaucccaaa

SEQ ID NO: 35602 - RNA, 21 nt, artificial
  Chemically synthesized
cucaagguccacuugguucau

SEQ ID NO: 35603 - RNA, 21 nt, artificial
  Chemically synthesized
cccauauuuuccuaauaugua

SEQ ID NO: 35604 - RNA, 21 nt, artificial
  Chemically synthesized
caauuccauaggugucuuccc

SEQ ID NO: 35605 - RNA, 21 nt, artificial
  Chemically synthesized
ccacuuuccucagcuccuuuu

SEQ ID NO: 35606 - RNA, 21 nt, artificial
  Chemically synthesized
acccuguugcugacugcucaa

SEQ ID NO: 35607 - RNA, 21 nt, artificial
  Chemically synthesized
gaguucuauguucuuccguca

SEQ ID NO: 35608 - RNA, 21 nt, artificial
  Chemically synthesized
agugcuucucuuagagcuuau

SEQ ID NO: 35609 - RNA, 21 nt, artificial
  Chemically synthesized
gacaaucaaugauuuuuaagc

SEQ ID NO: 35610 - RNA, 21 nt, artificial
  Chemically synthesized
aucagcacugguaagauugaa

SEQ ID NO: 35611 - RNA, 21 nt, artificial
  Chemically synthesized
gcauggaccuugaguuggacu

SEQ ID NO: 35612 - RNA, 21 nt, artificial
  Chemically synthesized
cuauuagaguugauugucagg

SEQ ID NO: 35613 - RNA, 21 nt, artificial
  Chemically synthesized
ugaacccuguggucucaaggu

SEQ ID NO: 35614 - RNA, 21 nt, artificial
  Chemically synthesized
agaguuccucauguagaccuu

SEQ ID NO: 35615 - RNA, 21 nt, artificial
  Chemically synthesized
acagcccaguuucauugauca

SEQ ID NO: 35616 - RNA, 21 nt, artificial
  Chemically synthesized
ugacugcucaagaggaggcaa

SEQ ID NO: 35617 - RNA, 21 nt, artificial
  Chemically synthesized
cucuugcuuaucuguuaguuu

SEQ ID NO: 35618 - RNA, 21 nt, artificial
  Chemically synthesized
aguugaggagcuacagacauu

SEQ ID NO: 35619 - RNA, 21 nt, artificial
  Chemically synthesized
gaugaguguagaacaccuggu

SEQ ID NO: 35620 - RNA, 21 nt, artificial
  Chemically synthesized
gaguuaaaagguguccuuuuc

SEQ ID NO: 35621 - RNA, 21 nt, artificial
  Chemically synthesized
acuugaccucaaaugcaugua

SEQ ID NO: 35622 - RNA, 21 nt, artificial
  Chemically synthesized
accugguagcugcuuuuucau

SEQ ID NO: 35623 - RNA, 21 nt, artificial
  Chemically synthesized
ugucuucccauuccagaggca

SEQ ID NO: 35624 - RNA, 21 nt, artificial
  Chemically synthesized
gcccagaguucuauguucuuc

SEQ ID NO: 35625 - RNA, 21 nt, artificial
  Chemically synthesized
aaagugcuucucuuagagcuu

SEQ ID NO: 35626 - RNA, 21 nt, artificial
  Chemically synthesized
guugaggagcuacagacauuu

SEQ ID NO: 35627 - RNA, 21 nt, artificial
  Chemically synthesized
agcuuauuaugcaagccucua

SEQ ID NO: 35628 - RNA, 21 nt, artificial
  Chemically synthesized
guccacuugguucaugucuuc

SEQ ID NO: 35629 - RNA, 21 nt, artificial
  Chemically synthesized
cuggaucucucuuauagaguu

SEQ ID NO: 35630 - RNA, 21 nt, artificial
  Chemically synthesized
ccaucccuuaaauccucaggu

SEQ ID NO: 35631 - RNA, 21 nt, artificial
  Chemically synthesized
gaaaacaucauuaguagcuga

SEQ ID NO: 35632 - RNA, 21 nt, artificial
  Chemically synthesized
uaguagcugacaaucaaugau

SEQ ID NO: 35633 - RNA, 21 nt, artificial
  Chemically synthesized
guacuucacaauaucuacauu

SEQ ID NO: 35634 - RNA, 21 nt, artificial
  Chemically synthesized
gacaauuccauaggugucuuc

SEQ ID NO: 35635 - RNA, 21 nt, artificial
  Chemically synthesized
gccucuuucagccucuuuagc

SEQ ID NO: 35636 - RNA, 21 nt, artificial
  Chemically synthesized
guagcugacaaucaaugauuu

SEQ ID NO: 35637 - RNA, 21 nt, artificial
  Chemically synthesized
caaaaaugcacaucuacauaa

SEQ ID NO: 35638 - RNA, 21 nt, artificial
  Chemically synthesized
cauaaacauuaggugaguuga

SEQ ID NO: 35639 - RNA, 21 nt, artificial
  Chemically synthesized
caggacaauuccauagguguc

SEQ ID NO: 35640 - RNA, 21 nt, artificial
  Chemically synthesized
cuucuucucaguccuguagag

SEQ ID NO: 35641 - RNA, 21 nt, artificial
  Chemically synthesized
aggaagcauucaaaaucuuga

SEQ ID NO: 35642 - RNA, 21 nt, artificial
  Chemically synthesized
caguuucauugaucacaaggc

SEQ ID NO: 35643 - RNA, 21 nt, artificial
  Chemically synthesized
guucuauguucuuccgucaua

SEQ ID NO: 35644 - RNA, 21 nt, artificial
  Chemically synthesized
cugguagacucucggaguucu

SEQ ID NO: 35645 - RNA, 21 nt, artificial
  Chemically synthesized
auccuaccaaggcaaccagaa

SEQ ID NO: 35646 - RNA, 21 nt, artificial
  Chemically synthesized
caaaguacagcccaguuucau

SEQ ID NO: 35647 - RNA, 21 nt, artificial
  Chemically synthesized
agugcaguagcucaucaucuu

SEQ ID NO: 35648 - RNA, 21 nt, artificial
  Chemically synthesized
agcacugguaagauugaacac

SEQ ID NO: 35649 - RNA, 21 nt, artificial
  Chemically synthesized
auugaccagagagagcucaga

SEQ ID NO: 35650 - RNA, 21 nt, artificial
  Chemically synthesized
gaaucauaauggaaagaaucc

SEQ ID NO: 35651 - RNA, 21 nt, artificial
  Chemically synthesized
ggccucuuucagccucuuuag

SEQ ID NO: 35652 - RNA, 21 nt, artificial
  Chemically synthesized
gaggugaguuaaaaggugucc

SEQ ID NO: 35653 - RNA, 21 nt, artificial
  Chemically synthesized
gaaguauacuuuggaauauac

SEQ ID NO: 35654 - RNA, 21 nt, artificial
  Chemically synthesized
cuguagguggaagagcugaaa

SEQ ID NO: 35655 - RNA, 21 nt, artificial
  Chemically synthesized
ccacccuucuuauacuucacu

SEQ ID NO: 35656 - RNA, 21 nt, artificial
  Chemically synthesized
cauuaguagcugacaaucaau

SEQ ID NO: 35657 - RNA, 21 nt, artificial
  Chemically synthesized
gcuucuccaaagaugaugcug

SEQ ID NO: 35658 - RNA, 21 nt, artificial
  Chemically synthesized
gccucuagucuuccuuuucca

SEQ ID NO: 35659 - RNA, 21 nt, artificial
  Chemically synthesized
gguaauugaagggcugcugca

SEQ ID NO: 35660 - RNA, 21 nt, artificial
  Chemically synthesized
cggugccuguaacaaagaauc

SEQ ID NO: 35661 - RNA, 21 nt, artificial
  Chemically synthesized
acaacauucucggugccugua

SEQ ID NO: 35662 - RNA, 21 nt, artificial
  Chemically synthesized
gaaccaugaaaaacaucacaa

SEQ ID NO: 35663 - RNA, 21 nt, artificial
  Chemically synthesized
cccaguuucauugaucacaag

SEQ ID NO: 35664 - RNA, 21 nt, artificial
  Chemically synthesized
aggcauggaccuugaguugga

SEQ ID NO: 35665 - RNA, 21 nt, artificial
  Chemically synthesized
agauuccucaaaauugaccag

SEQ ID NO: 35666 - RNA, 21 nt, artificial
  Chemically synthesized
cccuuaaauccucaggucaca

SEQ ID NO: 35667 - RNA, 21 nt, artificial
  Chemically synthesized
cugccuaaauacucucaggca

SEQ ID NO: 35668 - RNA, 21 nt, artificial
  Chemically synthesized
ccucaggucacaaccauguau

SEQ ID NO: 35669 - RNA, 21 nt, artificial
  Chemically synthesized
ccagaaccaugaaaaacauca

SEQ ID NO: 35670 - RNA, 21 nt, artificial
  Chemically synthesized
ccucacugaauacaacauucu

SEQ ID NO: 35671 - RNA, 21 nt, artificial
  Chemically synthesized
gagagagcucagauacguuga

SEQ ID NO: 35672 - RNA, 21 nt, artificial
  Chemically synthesized
cauucaaaaucuugaccaaau

SEQ ID NO: 35673 - RNA, 21 nt, artificial
  Chemically synthesized
gcugacaaucaaugauuuuua

SEQ ID NO: 35674 - RNA, 21 nt, artificial
  Chemically synthesized
aaaugaucagcacugguaaga

SEQ ID NO: 35675 - RNA, 21 nt, artificial
  Chemically synthesized
cuuuggaauauacaaaguaca

SEQ ID NO: 35676 - RNA, 21 nt, artificial
  Chemically synthesized
agcucagauacguugacauau

SEQ ID NO: 35677 - RNA, 21 nt, artificial
  Chemically synthesized
cugacaaucaaugauuuuuaa

SEQ ID NO: 35678 - RNA, 21 nt, artificial
  Chemically synthesized
gguagcugcuuuuucaugcuu

SEQ ID NO: 35679 - RNA, 21 nt, artificial
  Chemically synthesized
guucaugucuucuuacuugac

SEQ ID NO: 35680 - RNA, 21 nt, artificial
  Chemically synthesized
accuugagaggugaguuaaaa

SEQ ID NO: 35681 - RNA, 21 nt, artificial
  Chemically synthesized
gucuuccuuuuccaucccuua

SEQ ID NO: 35682 - RNA, 21 nt, artificial
  Chemically synthesized
cauggaccuugaguuggacuu

SEQ ID NO: 35683 - RNA, 21 nt, artificial
  Chemically synthesized
uagcugacaaucaaugauuuu

SEQ ID NO: 35684 - RNA, 21 nt, artificial
  Chemically synthesized
cuugaccaaaugcaacccaua

SEQ ID NO: 35685 - RNA, 21 nt, artificial
  Chemically synthesized
gccgaaaaacgucugagauuc

SEQ ID NO: 35686 - RNA, 21 nt, artificial
  Chemically synthesized
aggcacuaagaugaguguaga

SEQ ID NO: 35687 - RNA, 21 nt, artificial
  Chemically synthesized
cagaaccaugaaaaacaucac

SEQ ID NO: 35688 - RNA, 21 nt, artificial
  Chemically synthesized
cuuucagccucuuuagcuuau

SEQ ID NO: 35689 - RNA, 21 nt, artificial
  Chemically synthesized
cgaaaaacgucugagauuccu

SEQ ID NO: 35690 - RNA, 21 nt, artificial
  Chemically synthesized
cucagauacguugacauauaa

SEQ ID NO: 35691 - RNA, 21 nt, artificial
  Chemically synthesized
guccuuuucaaucugccuaaa

SEQ ID NO: 35692 - RNA, 21 nt, artificial
  Chemically synthesized
cacuuuccucagcuccuuuuu

SEQ ID NO: 35693 - RNA, 21 nt, artificial
  Chemically synthesized
gaccuugaguuggacuugccu

SEQ ID NO: 35694 - RNA, 21 nt, artificial
  Chemically synthesized
cagccucuuuagcuuauuaug

SEQ ID NO: 35695 - RNA, 21 nt, artificial
  Chemically synthesized
gauacguugacauauaaauga

SEQ ID NO: 35696 - RNA, 21 nt, artificial
  Chemically synthesized
caaaacaucucucuugcuuau

SEQ ID NO: 35697 - RNA, 21 nt, artificial
  Chemically synthesized
cuguagaggcugaggugucaa

SEQ ID NO: 35698 - RNA, 21 nt, artificial
  Chemically synthesized
gaguguagaacaccugguagc

SEQ ID NO: 35699 - RNA, 21 nt, artificial
  Chemically synthesized
gagaggugaguuaaaaggugu

SEQ ID NO: 35700 - RNA, 21 nt, artificial
  Chemically synthesized
aggcaagcuggaucucucuua

SEQ ID NO: 35701 - RNA, 21 nt, artificial
  Chemically synthesized
ugaccagagagagcucagaua

SEQ ID NO: 35702 - RNA, 21 nt, artificial
  Chemically synthesized
aagccgaaaaacgucugagau

SEQ ID NO: 35703 - RNA, 21 nt, artificial
  Chemically synthesized
gauuccucaaaauugaccaga

SEQ ID NO: 35704 - RNA, 21 nt, artificial
  Chemically synthesized
cucucuugcuuaucuguuagu

SEQ ID NO: 35705 - RNA, 21 nt, artificial
  Chemically synthesized
cucaaaugcauguaagaagac

SEQ ID NO: 35706 - RNA, 21 nt, artificial
  Chemically synthesized
cauuccagaggcauggaccuu

SEQ ID NO: 35707 - RNA, 21 nt, artificial
  Chemically synthesized
ucggugccuguaacaaagaau

SEQ ID NO: 35708 - RNA, 21 nt, artificial
  Chemically synthesized
cagaggcauggaccuugaguu

SEQ ID NO: 35709 - RNA, 21 nt, artificial
  Chemically synthesized
aagcuggaucucucuuauaga

SEQ ID NO: 35710 - RNA, 21 nt, artificial
  Chemically synthesized
ggagcuacagacauuuugaac

SEQ ID NO: 35711 - RNA, 21 nt, artificial
  Chemically synthesized
gaauacaacauucucggugcc

SEQ ID NO: 35712 - RNA, 21 nt, artificial
  Chemically synthesized
ccaaaacaucucucuugcuua

SEQ ID NO: 35713 - RNA, 21 nt, artificial
  Chemically synthesized
aggauaugcauuuagaaguga

SEQ ID NO: 35714 - RNA, 21 nt, artificial
  Chemically synthesized
gcauguaagaagacccucacu

SEQ ID NO: 35715 - RNA, 21 nt, artificial
  Chemically synthesized
caaccagaaccaugaaaaaca

SEQ ID NO: 35716 - RNA, 21 nt, artificial
  Chemically synthesized
cacaaaaaugcacaucuacau

SEQ ID NO: 35717 - RNA, 21 nt, artificial
  Chemically synthesized
agaggugaguuaaaagguguc

SEQ ID NO: 35718 - RNA, 21 nt, artificial
  Chemically synthesized
gcucagauacguugacauaua

SEQ ID NO: 35719 - RNA, 21 nt, artificial
  Chemically synthesized
gcugugguucccucucuucuu

SEQ ID NO: 35720 - RNA, 21 nt, artificial
  Chemically synthesized
caagccucuagucuuccuuuu

SEQ ID NO: 35721 - RNA, 21 nt, artificial
  Chemically synthesized
agaagacccucacugaauaca

SEQ ID NO: 35722 - RNA, 21 nt, artificial
  Chemically synthesized
caacauucucggugccuguaa

SEQ ID NO: 35723 - RNA, 21 nt, artificial
  Chemically synthesized
acaucauuaguagcugacaau

SEQ ID NO: 35724 - RNA, 21 nt, artificial
  Chemically synthesized
ccucuagucuuccuuuuccau

SEQ ID NO: 35725 - RNA, 21 nt, artificial
  Chemically synthesized
gaagacccucacugaauacaa

SEQ ID NO: 35726 - RNA, 21 nt, artificial
  Chemically synthesized
gccucuuuagcuuauuaugca

SEQ ID NO: 35727 - RNA, 21 nt, artificial
  Chemically synthesized
caagguccacuugguucaugu

SEQ ID NO: 35728 - RNA, 21 nt, artificial
  Chemically synthesized
ccagagagagcucagauacgu

SEQ ID NO: 35729 - RNA, 21 nt, artificial
  Chemically synthesized
cuaaauacucucaggcacuaa

SEQ ID NO: 35730 - RNA, 21 nt, artificial
  Chemically synthesized
aauacucucaggcacuaagau

SEQ ID NO: 35731 - RNA, 21 nt, artificial
  Chemically synthesized
gacauauaaaugaucagcacu

SEQ ID NO: 35732 - RNA, 21 nt, artificial
  Chemically synthesized
cagcccagaguucuauguucu

SEQ ID NO: 35733 - RNA, 21 nt, artificial
  Chemically synthesized
cucucaggcacuaagaugagu

SEQ ID NO: 35734 - RNA, 21 nt, artificial
  Chemically synthesized
gcuggaucucucuuauagagu

SEQ ID NO: 35735 - RNA, 21 nt, artificial
  Chemically synthesized
ggugaguugaggagcuacaga

SEQ ID NO: 35736 - RNA, 21 nt, artificial
  Chemically synthesized
ccucuuuagcuuauuaugcaa

SEQ ID NO: 35737 - RNA, 21 nt, artificial
  Chemically synthesized
gucuucuuacuugaccucaaa

SEQ ID NO: 35738 - RNA, 21 nt, artificial
  Chemically synthesized
cccaguagugcaguagcucau

SEQ ID NO: 35739 - RNA, 21 nt, artificial
  Chemically synthesized
guagguggaagagcugaaaca

SEQ ID NO: 35740 - RNA, 21 nt, artificial
  Chemically synthesized
caaccauguaucugaaagaca

SEQ ID NO: 35741 - RNA, 21 nt, artificial
  Chemically synthesized
gucacaaccauguaucugaaa

SEQ ID NO: 35742 - RNA, 21 nt, artificial
  Chemically synthesized
ggccuauuugcuucuccaaag

SEQ ID NO: 35743 - RNA, 21 nt, artificial
  Chemically synthesized
ccgucauauuccuccauuugu

SEQ ID NO: 35744 - RNA, 21 nt, artificial
  Chemically synthesized
agcauucaaaaucuugaccaa

SEQ ID NO: 35745 - RNA, 21 nt, artificial
  Chemically synthesized
gggcagguuguugcaagauug

SEQ ID NO: 35746 - RNA, 21 nt, artificial
  Chemically synthesized
gcucauaaacauuaggugagu

SEQ ID NO: 35747 - RNA, 21 nt, artificial
  Chemically synthesized
gcacuaagaugaguguagaac

SEQ ID NO: 35748 - RNA, 21 nt, artificial
  Chemically synthesized
gaggagcuacagacauuuuga

SEQ ID NO: 35749 - RNA, 21 nt, artificial
  Chemically synthesized
agagagcucagauacguugac

SEQ ID NO: 35750 - RNA, 21 nt, artificial
  Chemically synthesized
ggugaguuaaaagguguccuu

SEQ ID NO: 35751 - RNA, 21 nt, artificial
  Chemically synthesized
ccuguaacaaagaaucauaau

SEQ ID NO: 35752 - RNA, 21 nt, artificial
  Chemically synthesized
ggcucaggauaugcauuuaga

SEQ ID NO: 35753 - RNA, 21 nt, artificial
  Chemically synthesized
ccgaaaaacgucugagauucc

SEQ ID NO: 35754 - RNA, 21 nt, artificial
  Chemically synthesized
cuccuucuguagguggaagag

SEQ ID NO: 35755 - RNA, 21 nt, artificial
  Chemically synthesized
gaguugaggagcuacagacau

SEQ ID NO: 35756 - RNA, 21 nt, artificial
  Chemically synthesized
cagagagagcucagauacguu

SEQ ID NO: 35757 - RNA, 21 nt, artificial
  Chemically synthesized
gaguuccucauguagaccuug

SEQ ID NO: 35758 - RNA, 21 nt, artificial
  Chemically synthesized
ccuauuugcuucuccaaagau

SEQ ID NO: 35759 - RNA, 21 nt, artificial
  Chemically synthesized
ccaauccuaccaaggcaacca

SEQ ID NO: 35760 - RNA, 21 nt, artificial
  Chemically synthesized
ccuccaucaucaccagauccu

SEQ ID NO: 35761 - RNA, 21 nt, artificial
  Chemically synthesized
cagauacguugacauauaaau

SEQ ID NO: 35762 - RNA, 21 nt, artificial
  Chemically synthesized
gaguuuccauagcuaagggaa

SEQ ID NO: 35763 - RNA, 21 nt, artificial
  Chemically synthesized
ccaaggcaaccagaaccauga

SEQ ID NO: 35764 - RNA, 21 nt, artificial
  Chemically synthesized
gcaaccagaaccaugaaaaac

SEQ ID NO: 35765 - RNA, 21 nt, artificial
  Chemically synthesized
cagcccaguuucauugaucac

SEQ ID NO: 35766 - RNA, 21 nt, artificial
  Chemically synthesized
gagcuacagacauuuugaacc

SEQ ID NO: 35767 - RNA, 21 nt, artificial
  Chemically synthesized
gccuaaauacucucaggcacu

SEQ ID NO: 35768 - RNA, 21 nt, artificial
  Chemically synthesized
ccacuugguucaugucuucuu

SEQ ID NO: 35769 - RNA, 21 nt, artificial
  Chemically synthesized
gcacaucuacauaaauauuua

SEQ ID NO: 35770 - RNA, 21 nt, artificial
  Chemically synthesized
aggagcuacagacauuuugaa

SEQ ID NO: 35771 - RNA, 21 nt, artificial
  Chemically synthesized
agagcucagauacguugacau

SEQ ID NO: 35772 - RNA, 21 nt, artificial
  Chemically synthesized
ccuugagaggugaguuaaaag

SEQ ID NO: 35773 - RNA, 21 nt, artificial
  Chemically synthesized
cgucugagauuccucaaaauu

SEQ ID NO: 35774 - RNA, 21 nt, artificial
  Chemically synthesized
guuccucauguagaccuugug

SEQ ID NO: 35775 - RNA, 21 nt, artificial
  Chemically synthesized
cucaggcacuaagaugagugu

SEQ ID NO: 35776 - RNA, 21 nt, artificial
  Chemically synthesized
cauguuuucauuucacaaaaa

SEQ ID NO: 35777 - RNA, 21 nt, artificial
  Chemically synthesized
caacccauauuuuccuaauau

SEQ ID NO: 35778 - RNA, 21 nt, artificial
  Chemically synthesized
aagguccacuugguucauguc

SEQ ID NO: 35779 - RNA, 21 nt, artificial
  Chemically synthesized
ccuuuucaaucugccuaaaua

SEQ ID NO: 35780 - RNA, 21 nt, artificial
  Chemically synthesized
guagaacaccugguagcugcu

SEQ ID NO: 35781 - RNA, 21 nt, artificial
  Chemically synthesized
gcauuuagaagugaagaugcu

SEQ ID NO: 35782 - RNA, 21 nt, artificial
  Chemically synthesized
gagcucagauacguugacaua

SEQ ID NO: 35783 - RNA, 21 nt, artificial
  Chemically synthesized
gguucaugucuucuuacuuga

SEQ ID NO: 35784 - RNA, 21 nt, artificial
  Chemically synthesized
cucggugccuguaacaaagaa

SEQ ID NO: 35785 - RNA, 21 nt, artificial
  Chemically synthesized
guacagcccaguuucauugau

SEQ ID NO: 35786 - RNA, 21 nt, artificial
  Chemically synthesized
gaggcaagcuggaucucucuu

SEQ ID NO: 35787 - RNA, 21 nt, artificial
  Chemically synthesized
ggucucaagguccacuugguu

SEQ ID NO: 35788 - RNA, 21 nt, artificial
  Chemically synthesized
gaaucccaaagugcuucucuu

SEQ ID NO: 35789 - RNA, 21 nt, artificial
  Chemically synthesized
aaugcacaucuacauaaauau

SEQ ID NO: 35790 - RNA, 21 nt, artificial
  Chemically synthesized
gcagcccagaguucuauguuc

SEQ ID NO: 35791 - RNA, 21 nt, artificial
  Chemically synthesized
ccuaaauacucucaggcacua

SEQ ID NO: 35792 - RNA, 21 nt, artificial
  Chemically synthesized
ggcucauaaacauuaggugag

SEQ ID NO: 35793 - RNA, 21 nt, artificial
  Chemically synthesized
aaacgucugagauuccucaaa

SEQ ID NO: 35794 - RNA, 21 nt, artificial
  Chemically synthesized
ggcaagcuggaucucucuuau

SEQ ID NO: 35795 - RNA, 21 nt, artificial
  Chemically synthesized
ccaccuugagaggugaguuaa

SEQ ID NO: 35796 - RNA, 21 nt, artificial
  Chemically synthesized
ugaccucaaaugcauguaaga

SEQ ID NO: 35797 - RNA, 21 nt, artificial
  Chemically synthesized
ggaaguauacuuuggaauaua

SEQ ID NO: 35798 - RNA, 21 nt, artificial
  Chemically synthesized
gcagguuguugcaagauugac

SEQ ID NO: 35799 - RNA, 21 nt, artificial
  Chemically synthesized
ccaugaaaaacaucacaagga

SEQ ID NO: 35800 - RNA, 21 nt, artificial
  Chemically synthesized
aguuuccauagcuaagggaaa

SEQ ID NO: 35801 - RNA, 21 nt, artificial
  Chemically synthesized
gccuauuugcuucuccaaaga

SEQ ID NO: 35802 - RNA, 21 nt, artificial
  Chemically synthesized
aaaaugcacaucuacauaaau

SEQ ID NO: 35803 - RNA, 21 nt, artificial
  Chemically synthesized
ggcagcccagaguucuauguu

SEQ ID NO: 35804 - RNA, 21 nt, artificial
  Chemically synthesized
cacaaccauguaucugaaaga

SEQ ID NO: 35805 - RNA, 21 nt, artificial
  Chemically synthesized
caaggcaaccagaaccaugaa

SEQ ID NO: 35806 - RNA, 21 nt, artificial
  Chemically synthesized
agcugacaaucaaugauuuuu

SEQ ID NO: 35807 - RNA, 21 nt, artificial
  Chemically synthesized
ccggaaguauacuuuggaaua

SEQ ID NO: 35808 - RNA, 21 nt, artificial
  Chemically synthesized
gguguccuuuucaaucugccu

SEQ ID NO: 35809 - RNA, 21 nt, artificial
  Chemically synthesized
caaagaaucauaauggaaaga

SEQ ID NO: 35810 - RNA, 21 nt, artificial
  Chemically synthesized
agaguugauugucaggaagca

SEQ ID NO: 35811 - RNA, 23 nt, artificial
  Chemically synthesized
auaaauauuuauguagaugugca

SEQ ID NO: 35812 - RNA, 23 nt, artificial
  Chemically synthesized
cagcuaccagguguucuacacuc

SEQ ID NO: 35813 - RNA, 23 nt, artificial
  Chemically synthesized
uaaauauuuauguagaugugcau

SEQ ID NO: 35814 - RNA, 23 nt, artificial
  Chemically synthesized
uuguauucagugagggucuucuu

SEQ ID NO: 35815 - RNA, 23 nt, artificial
  Chemically synthesized
auucuuuguuacaggcaccgaga

SEQ ID NO: 35816 - RNA, 23 nt, artificial
  Chemically synthesized
guuguauucagugagggucuucu

SEQ ID NO: 35817 - RNA, 23 nt, artificial
  Chemically synthesized
gugaucaaugaaacugggcugua

SEQ ID NO: 35818 - RNA, 23 nt, artificial
  Chemically synthesized
uguaauaaaaaguauauguuagg

SEQ ID NO: 35819 - RNA, 23 nt, artificial
  Chemically synthesized
gauucuuuguuacaggcaccgag

SEQ ID NO: 35820 - RNA, 23 nt, artificial
  Chemically synthesized
ucuuuccauuaugauucuuuguu

SEQ ID NO: 35821 - RNA, 23 nt, artificial
  Chemically synthesized
aauauuuauguagaugugcauuu

SEQ ID NO: 35822 - RNA, 23 nt, artificial
  Chemically synthesized
cuacugcacuacugggcagaugu

SEQ ID NO: 35823 - RNA, 23 nt, artificial
  Chemically synthesized
gaccacaggguucaaaaugucug

SEQ ID NO: 35824 - RNA, 23 nt, artificial
  Chemically synthesized
aaauauuuauguagaugugcauu

SEQ ID NO: 35825 - RNA, 23 nt, artificial
  Chemically synthesized
auauuaggaaaauauggguugca

SEQ ID NO: 35826 - RNA, 23 nt, artificial
  Chemically synthesized
auauaagcucuaagagaagcacu

SEQ ID NO: 35827 - RNA, 23 nt, artificial
  Chemically synthesized
auucuuuccauuaugauucuuug

SEQ ID NO: 35828 - RNA, 23 nt, artificial
  Chemically synthesized
guguucaaucuuaccagugcuga

SEQ ID NO: 35829 - RNA, 23 nt, artificial
  Chemically synthesized
gaaucucagacguuuuucggcuu

SEQ ID NO: 35830 - RNA, 23 nt, artificial
  Chemically synthesized
uauuuauguagaugugcauuuuu

SEQ ID NO: 35831 - RNA, 23 nt, artificial
  Chemically synthesized
aaucucagacguuuuucggcuua

SEQ ID NO: 35832 - RNA, 23 nt, artificial
  Chemically synthesized
augagcuacugcacuacugggca

SEQ ID NO: 35833 - RNA, 23 nt, artificial
  Chemically synthesized
uauggaauuguccugcuuucugg

SEQ ID NO: 35834 - RNA, 23 nt, artificial
  Chemically synthesized
guauauuccaaaguauacuuccg

SEQ ID NO: 35835 - RNA, 23 nt, artificial
  Chemically synthesized
uacugcacuacugggcagaugug

SEQ ID NO: 35836 - RNA, 23 nt, artificial
  Chemically synthesized
aacguaucugagcucucucuggu

SEQ ID NO: 35837 - RNA, 23 nt, artificial
  Chemically synthesized
auuuauguagaugugcauuuuug

SEQ ID NO: 35838 - RNA, 23 nt, artificial
  Chemically synthesized
guuuuucggcuuauauaagcucu

SEQ ID NO: 35839 - RNA, 23 nt, artificial
  Chemically synthesized
uuauaugucaacguaucugagcu

SEQ ID NO: 35840 - RNA, 23 nt, artificial
  Chemically synthesized
acauauuaggaaaauauggguug

SEQ ID NO: 35841 - RNA, 23 nt, artificial
  Chemically synthesized
uacauauuaggaaaauauggguu

SEQ ID NO: 35842 - RNA, 23 nt, artificial
  Chemically synthesized
auuuauaugucaacguaucugag

SEQ ID NO: 35843 - RNA, 23 nt, artificial
  Chemically synthesized
guuuuucaugguucugguugccu

SEQ ID NO: 35844 - RNA, 23 nt, artificial
  Chemically synthesized
uucuuuccauuaugauucuuugu

SEQ ID NO: 35845 - RNA, 23 nt, artificial
  Chemically synthesized
uguuacaggcaccgagaauguug

SEQ ID NO: 35846 - RNA, 23 nt, artificial
  Chemically synthesized
uccaacucaagguccaugccucu

SEQ ID NO: 35847 - RNA, 23 nt, artificial
  Chemically synthesized
auaugucaacguaucugagcucu

SEQ ID NO: 35848 - RNA, 23 nt, artificial
  Chemically synthesized
ggacaccuuuuaacucaccucuc

SEQ ID NO: 35849 - RNA, 23 nt, artificial
  Chemically synthesized
gaagaacauagaacucugggcug

SEQ ID NO: 35850 - RNA, 23 nt, artificial
  Chemically synthesized
aguguucaaucuuaccagugcug

SEQ ID NO: 35851 - RNA, 23 nt, artificial
  Chemically synthesized
uauaagagagauccagcuugccu

SEQ ID NO: 35852 - RNA, 23 nt, artificial
  Chemically synthesized
auuuugaggaaucucagacguuu

SEQ ID NO: 35853 - RNA, 23 nt, artificial
  Chemically synthesized
aagagagauccagcuugccuccu

SEQ ID NO: 35854 - RNA, 23 nt, artificial
  Chemically synthesized
gucaagauuuugaaugcuuccug

SEQ ID NO: 35855 - RNA, 23 nt, artificial
  Chemically synthesized
auauuuauguagaugugcauuuu

SEQ ID NO: 35856 - RNA, 23 nt, artificial
  Chemically synthesized
ggguucaaaaugucuguagcucc

SEQ ID NO: 35857 - RNA, 23 nt, artificial
  Chemically synthesized
uguauauuccaaaguauacuucc

SEQ ID NO: 35858 - RNA, 23 nt, artificial
  Chemically synthesized
gaaaaggaagacuagaggcuugc

SEQ ID NO: 35859 - RNA, 23 nt, artificial
  Chemically synthesized
agacaugaaccaaguggaccuug

SEQ ID NO: 35860 - RNA, 23 nt, artificial
  Chemically synthesized
agaacauagaacucugggcugcc

SEQ ID NO: 35861 - RNA, 23 nt, artificial
  Chemically synthesized
uuuauaugucaacguaucugagc

SEQ ID NO: 35862 - RNA, 23 nt, artificial
  Chemically synthesized
aggguucaaaaugucuguagcuc

SEQ ID NO: 35863 - RNA, 23 nt, artificial
  Chemically synthesized
aaaaagcagcuaccagguguucu

SEQ ID NO: 35864 - RNA, 23 nt, artificial
  Chemically synthesized
uaugauucuuuguuacaggcacc

SEQ ID NO: 35865 - RNA, 23 nt, artificial
  Chemically synthesized
acguaucugagcucucucugguc

SEQ ID NO: 35866 - RNA, 23 nt, artificial
  Chemically synthesized
uauaugucaacguaucugagcuc

SEQ ID NO: 35867 - RNA, 23 nt, artificial
  Chemically synthesized
auaagagagauccagcuugccuc

SEQ ID NO: 35868 - RNA, 23 nt, artificial
  Chemically synthesized
uuuaacucaccucucaagguggg

SEQ ID NO: 35869 - RNA, 23 nt, artificial
  Chemically synthesized
cauauuaggaaaauauggguugc

SEQ ID NO: 35870 - RNA, 23 nt, artificial
  Chemically synthesized
uucuucccuguccaaccucugug

SEQ ID NO: 35871 - RNA, 23 nt, artificial
  Chemically synthesized
aggaaucucagacguuuuucggc

SEQ ID NO: 35872 - RNA, 23 nt, artificial
  Chemically synthesized
aauaaauauuuauguagaugugc

SEQ ID NO: 35873 - RNA, 23 nt, artificial
  Chemically synthesized
uaugucaacguaucugagcucuc

SEQ ID NO: 35874 - RNA, 23 nt, artificial
  Chemically synthesized
uauauuccaaaguauacuuccgg

SEQ ID NO: 35875 - RNA, 23 nt, artificial
  Chemically synthesized
auauuccaaaguauacuuccggg

SEQ ID NO: 35876 - RNA, 23 nt, artificial
  Chemically synthesized
uuuuaacucaccucucaaggugg

SEQ ID NO: 35877 - RNA, 23 nt, artificial
  Chemically synthesized
augauucuuuguuacaggcaccg

SEQ ID NO: 35878 - RNA, 23 nt, artificial
  Chemically synthesized
uaagagagauccagcuugccucc

SEQ ID NO: 35879 - RNA, 23 nt, artificial
  Chemically synthesized
uuagugccugagaguauuuaggc

SEQ ID NO: 35880 - RNA, 23 nt, artificial
  Chemically synthesized
gucaaucuugcaacaaccugccc

SEQ ID NO: 35881 - RNA, 23 nt, artificial
  Chemically synthesized
uucuacacucaucuuagugccug

SEQ ID NO: 35882 - RNA, 23 nt, artificial
  Chemically synthesized
uuaacucaccucucaaggugggc

SEQ ID NO: 35883 - RNA, 23 nt, artificial
  Chemically synthesized
aagaacauagaacucugggcugc

SEQ ID NO: 35884 - RNA, 23 nt, artificial
  Chemically synthesized
ugcacaucuacauaaauauuuau

SEQ ID NO: 35885 - RNA, 23 nt, artificial
  Chemically synthesized
gaguguagaacaccugguagcug

SEQ ID NO: 35886 - RNA, 23 nt, artificial
  Chemically synthesized
augcacaucuacauaaauauuua

SEQ ID NO: 35887 - RNA, 23 nt, artificial
  Chemically synthesized
aagaagacccucacugaauacaa

SEQ ID NO: 35888 - RNA, 23 nt, artificial
  Chemically synthesized
ucucggugccuguaacaaagaau

SEQ ID NO: 35889 - RNA, 23 nt, artificial
  Chemically synthesized
agaagacccucacugaauacaac

SEQ ID NO: 35890 - RNA, 23 nt, artificial
  Chemically synthesized
uacagcccaguuucauugaucac

SEQ ID NO: 35891 - RNA, 23 nt, artificial
  Chemically synthesized
ccuaacauauacuuuuuauuaca

SEQ ID NO: 35892 - RNA, 23 nt, artificial
  Chemically synthesized
cucggugccuguaacaaagaauc

SEQ ID NO: 35893 - RNA, 23 nt, artificial
  Chemically synthesized
aacaaagaaucauaauggaaaga

SEQ ID NO: 35894 - RNA, 23 nt, artificial
  Chemically synthesized
aaaugcacaucuacauaaauauu

SEQ ID NO: 35895 - RNA, 23 nt, artificial
  Chemically synthesized
acaucugcccaguagugcaguag

SEQ ID NO: 35896 - RNA, 23 nt, artificial
  Chemically synthesized
cagacauuuugaacccugugguc

SEQ ID NO: 35897 - RNA, 23 nt, artificial
  Chemically synthesized
aaugcacaucuacauaaauauuu

SEQ ID NO: 35898 - RNA, 23 nt, artificial
  Chemically synthesized
ugcaacccauauuuuccuaauau

SEQ ID NO: 35899 - RNA, 23 nt, artificial
  Chemically synthesized
agugcuucucuuagagcuuauau

SEQ ID NO: 35900 - RNA, 23 nt, artificial
  Chemically synthesized
caaagaaucauaauggaaagaau

SEQ ID NO: 35901 - RNA, 23 nt, artificial
  Chemically synthesized
ucagcacugguaagauugaacac

SEQ ID NO: 35902 - RNA, 23 nt, artificial
  Chemically synthesized
aagccgaaaaacgucugagauuc

SEQ ID NO: 35903 - RNA, 23 nt, artificial
  Chemically synthesized
aaaaaugcacaucuacauaaaua

SEQ ID NO: 35904 - RNA, 23 nt, artificial
  Chemically synthesized
uaagccgaaaaacgucugagauu

SEQ ID NO: 35905 - RNA, 23 nt, artificial
  Chemically synthesized
ugcccaguagugcaguagcucau

SEQ ID NO: 35906 - RNA, 23 nt, artificial
  Chemically synthesized
ccagaaagcaggacaauuccaua

SEQ ID NO: 35907 - RNA, 23 nt, artificial
  Chemically synthesized
cggaaguauacuuuggaauauac

SEQ ID NO: 35908 - RNA, 23 nt, artificial
  Chemically synthesized
cacaucugcccaguagugcagua

SEQ ID NO: 35909 - RNA, 23 nt, artificial
  Chemically synthesized
accagagagagcucagauacguu

SEQ ID NO: 35910 - RNA, 23 nt, artificial
  Chemically synthesized
caaaaaugcacaucuacauaaau

SEQ ID NO: 35911 - RNA, 23 nt, artificial
  Chemically synthesized
agagcuuauauaagccgaaaaac

SEQ ID NO: 35912 - RNA, 23 nt, artificial
  Chemically synthesized
agcucagauacguugacauauaa

SEQ ID NO: 35913 - RNA, 23 nt, artificial
  Chemically synthesized
caacccauauuuuccuaauaugu

SEQ ID NO: 35914 - RNA, 23 nt, artificial
  Chemically synthesized
aacccauauuuuccuaauaugua

SEQ ID NO: 35915 - RNA, 23 nt, artificial
  Chemically synthesized
cucagauacguugacauauaaau

SEQ ID NO: 35916 - RNA, 23 nt, artificial
  Chemically synthesized
aggcaaccagaaccaugaaaaac

SEQ ID NO: 35917 - RNA, 23 nt, artificial
  Chemically synthesized
acaaagaaucauaauggaaagaa

SEQ ID NO: 35918 - RNA, 23 nt, artificial
  Chemically synthesized
caacauucucggugccuguaaca

SEQ ID NO: 35919 - RNA, 23 nt, artificial
  Chemically synthesized
agaggcauggaccuugaguugga

SEQ ID NO: 35920 - RNA, 23 nt, artificial
  Chemically synthesized
agagcucagauacguugacauau

SEQ ID NO: 35921 - RNA, 23 nt, artificial
  Chemically synthesized
gagaggugaguuaaaaggugucc

SEQ ID NO: 35922 - RNA, 23 nt, artificial
  Chemically synthesized
cagcccagaguucuauguucuuc

SEQ ID NO: 35923 - RNA, 23 nt, artificial
  Chemically synthesized
cagcacugguaagauugaacacu

SEQ ID NO: 35924 - RNA, 23 nt, artificial
  Chemically synthesized
aggcaagcuggaucucucuuaua

SEQ ID NO: 35925 - RNA, 23 nt, artificial
  Chemically synthesized
aaacgucugagauuccucaaaau

SEQ ID NO: 35926 - RNA, 23 nt, artificial
  Chemically synthesized
aggaggcaagcuggaucucucuu

SEQ ID NO: 35927 - RNA, 23 nt, artificial
  Chemically synthesized
caggaagcauucaaaaucuugac

SEQ ID NO: 35928 - RNA, 23 nt, artificial
  Chemically synthesized
aaaaugcacaucuacauaaauau

SEQ ID NO: 35929 - RNA, 23 nt, artificial
  Chemically synthesized
ggagcuacagacauuuugaaccc

SEQ ID NO: 35930 - RNA, 23 nt, artificial
  Chemically synthesized
ggaaguauacuuuggaauauaca

SEQ ID NO: 35931 - RNA, 23 nt, artificial
  Chemically synthesized
gcaagccucuagucuuccuuuuc

SEQ ID NO: 35932 - RNA, 23 nt, artificial
  Chemically synthesized
caagguccacuugguucaugucu

SEQ ID NO: 35933 - RNA, 23 nt, artificial
  Chemically synthesized
ggcagcccagaguucuauguucu

SEQ ID NO: 35934 - RNA, 23 nt, artificial
  Chemically synthesized
gcucagauacguugacauauaaa

SEQ ID NO: 35935 - RNA, 23 nt, artificial
  Chemically synthesized
gagcuacagacauuuugaacccu

SEQ ID NO: 35936 - RNA, 23 nt, artificial
  Chemically synthesized
agaacaccugguagcugcuuuuu

SEQ ID NO: 35937 - RNA, 23 nt, artificial
  Chemically synthesized
ggugccuguaacaaagaaucaua

SEQ ID NO: 35938 - RNA, 23 nt, artificial
  Chemically synthesized
gaccagagagagcucagauacgu

SEQ ID NO: 35939 - RNA, 23 nt, artificial
  Chemically synthesized
gagcucagauacguugacauaua

SEQ ID NO: 35940 - RNA, 23 nt, artificial
  Chemically synthesized
gaggcaagcuggaucucucuuau

SEQ ID NO: 35941 - RNA, 23 nt, artificial
  Chemically synthesized
cccaccuugagaggugaguuaaa

SEQ ID NO: 35942 - RNA, 23 nt, artificial
  Chemically synthesized
gcaacccauauuuuccuaauaug

SEQ ID NO: 35943 - RNA, 23 nt, artificial
  Chemically synthesized
cacagagguuggacagggaagaa

SEQ ID NO: 35944 - RNA, 23 nt, artificial
  Chemically synthesized
gccgaaaaacgucugagauuccu

SEQ ID NO: 35945 - RNA, 23 nt, artificial
  Chemically synthesized
gcacaucuacauaaauauuuauu

SEQ ID NO: 35946 - RNA, 23 nt, artificial
  Chemically synthesized
gagagcucagauacguugacaua

SEQ ID NO: 35947 - RNA, 23 nt, artificial
  Chemically synthesized
ccggaaguauacuuuggaauaua

SEQ ID NO: 35948 - RNA, 23 nt, artificial
  Chemically synthesized
cccggaaguauacuuuggaauau

SEQ ID NO: 35949 - RNA, 23 nt, artificial
  Chemically synthesized
ccaccuugagaggugaguuaaaa

SEQ ID NO: 35950 - RNA, 23 nt, artificial
  Chemically synthesized
cggugccuguaacaaagaaucau

SEQ ID NO: 35951 - RNA, 23 nt, artificial
  Chemically synthesized
ggaggcaagcuggaucucucuua

SEQ ID NO: 35952 - RNA, 23 nt, artificial
  Chemically synthesized
gccuaaauacucucaggcacuaa

SEQ ID NO: 35953 - RNA, 23 nt, artificial
  Chemically synthesized
gggcagguuguugcaagauugac

SEQ ID NO: 35954 - RNA, 23 nt, artificial
  Chemically synthesized
caggcacuaagaugaguguagaa

SEQ ID NO: 35955 - RNA, 23 nt, artificial
  Chemically synthesized
gcccaccuugagaggugaguuaa

SEQ ID NO: 35956 - RNA, 23 nt, artificial
  Chemically synthesized
gcagcccagaguucuauguucuu

SEQ ID NO: 35957 - RNA, 23 nt, artificial
  Chemically synthesized
aucggugaaacuaacagauaagc

SEQ ID NO: 35958 - RNA, 23 nt, artificial
  Chemically synthesized
aagagggagaagcaugaaaaagc

SEQ ID NO: 35959 - RNA, 23 nt, artificial
  Chemically synthesized
cucuaauagugcuuaaaaaucau

SEQ ID NO: 35960 - RNA, 23 nt, artificial
  Chemically synthesized
acucuaauagugcuuaaaaauca

SEQ ID NO: 35961 - RNA, 23 nt, artificial
  Chemically synthesized
aacucuaauagugcuuaaaaauc

SEQ ID NO: 35962 - RNA, 23 nt, artificial
  Chemically synthesized
caacucuaauagugcuuaaaaau

SEQ ID NO: 35963 - RNA, 23 nt, artificial
  Chemically synthesized
ucaacucuaauagugcuuaaaaa

SEQ ID NO: 35964 - RNA, 23 nt, artificial
  Chemically synthesized
gaggauuuaagggauggaaaagg

SEQ ID NO: 35965 - RNA, 23 nt, artificial
  Chemically synthesized
ugaggauuuaagggauggaaaag

SEQ ID NO: 35966 - RNA, 23 nt, artificial
  Chemically synthesized
auggaggaauaugacggaagaac

SEQ ID NO: 35967 - RNA, 23 nt, artificial
  Chemically synthesized
gcauuuuugugaaaugaaaacau

SEQ ID NO: 35968 - RNA, 23 nt, artificial
  Chemically synthesized
ugcauuuuugugaaaugaaaaca

SEQ ID NO: 35969 - RNA, 23 nt, artificial
  Chemically synthesized
ugugcauuuuugugaaaugaaaa

SEQ ID NO: 35970 - RNA, 23 nt, artificial
  Chemically synthesized
augugcauuuuugugaaaugaaa

SEQ ID NO: 35971 - RNA, 23 nt, artificial
  Chemically synthesized
gcagcaucuucacuucuaaaugc

SEQ ID NO: 35972 - RNA, 23 nt, artificial
  Chemically synthesized
ggcagcaucuucacuucuaaaug

SEQ ID NO: 35973 - RNA, 23 nt, artificial
  Chemically synthesized
acaggacugagaagaaguaaaac

SEQ ID NO: 35974 - RNA, 23 nt, artificial
  Chemically synthesized
cguuuuucggcuuauauaagcuc

SEQ ID NO: 35975 - RNA, 23 nt, artificial
  Chemically synthesized
acguuuuucggcuuauauaagcu

SEQ ID NO: 35976 - RNA, 23 nt, artificial
  Chemically synthesized
gacguuuuucggcuuauauaagc

SEQ ID NO: 35977 - RNA, 23 nt, artificial
  Chemically synthesized
ucagugagggucuucuuacaugc

SEQ ID NO: 35978 - RNA, 23 nt, artificial
  Chemically synthesized
uucagugagggucuucuuacaug

SEQ ID NO: 35979 - RNA, 23 nt, artificial
  Chemically synthesized
auucagugagggucuucuuacau

SEQ ID NO: 35980 - RNA, 23 nt, artificial
  Chemically synthesized
uccauuaugauucuuuguuacag

SEQ ID NO: 35981 - RNA, 23 nt, artificial
  Chemically synthesized
uuccauuaugauucuuuguuaca

SEQ ID NO: 35982 - RNA, 23 nt, artificial
  Chemically synthesized
uuuccauuaugauucuuuguuac

SEQ ID NO: 35983 - RNA, 23 nt, artificial
  Chemically synthesized
cuuuccauuaugauucuuuguua

SEQ ID NO: 35984 - RNA, 23 nt, artificial
  Chemically synthesized
aucaacucuaauagugcuuaaaa

SEQ ID NO: 35985 - RNA, 23 nt, artificial
  Chemically synthesized
aaucaacucuaauagugcuuaaa

SEQ ID NO: 35986 - RNA, 23 nt, artificial
  Chemically synthesized
acuagaggcuugcauaauaagcu

SEQ ID NO: 35987 - RNA, 23 nt, artificial
  Chemically synthesized
gacuagaggcuugcauaauaagc

SEQ ID NO: 35988 - RNA, 23 nt, artificial
  Chemically synthesized
caccgagaauguuguauucagug

SEQ ID NO: 35989 - RNA, 23 nt, artificial
  Chemically synthesized
gggauguuucagcucuuccaccu

SEQ ID NO: 35990 - RNA, 23 nt, artificial
  Chemically synthesized
ggggauguuucagcucuuccacc

SEQ ID NO: 35991 - RNA, 23 nt, artificial
  Chemically synthesized
uggggauguuucagcucuuccac

SEQ ID NO: 35992 - RNA, 23 nt, artificial
  Chemically synthesized
cuggggauguuucagcucuucca

SEQ ID NO: 35993 - RNA, 23 nt, artificial
  Chemically synthesized
ucggcuuauauaagcucuaagag

SEQ ID NO: 35994 - RNA, 23 nt, artificial
  Chemically synthesized
uuucggcuuauauaagcucuaag

SEQ ID NO: 35995 - RNA, 23 nt, artificial
  Chemically synthesized
gggacucauuucauuccuaacac

SEQ ID NO: 35996 - RNA, 23 nt, artificial
  Chemically synthesized
ggggacucauuucauuccuaaca

SEQ ID NO: 35997 - RNA, 23 nt, artificial
  Chemically synthesized
uggggacucauuucauuccuaac

SEQ ID NO: 35998 - RNA, 23 nt, artificial
  Chemically synthesized
uuggggacucauuucauuccuaa

SEQ ID NO: 35999 - RNA, 23 nt, artificial
  Chemically synthesized
cauuuuugugaaaugaaaacaug

SEQ ID NO: 36000 - RNA, 23 nt, artificial
  Chemically synthesized
ucuggagugaaguauaagaaggg

SEQ ID NO: 36001 - RNA, 23 nt, artificial
  Chemically synthesized
uucuggagugaaguauaagaagg

SEQ ID NO: 36002 - RNA, 23 nt, artificial
  Chemically synthesized
uuucuggagugaaguauaagaag

SEQ ID NO: 36003 - RNA, 23 nt, artificial
  Chemically synthesized
gguugcauuuggucaagauuuug

SEQ ID NO: 36004 - RNA, 23 nt, artificial
  Chemically synthesized
ugaaacuaacagauaagcaagag

SEQ ID NO: 36005 - RNA, 23 nt, artificial
  Chemically synthesized
ccucuugagcagucagcaacagg

SEQ ID NO: 36006 - RNA, 23 nt, artificial
  Chemically synthesized
uccucuugagcagucagcaacag

SEQ ID NO: 36007 - RNA, 23 nt, artificial
  Chemically synthesized
cuccucuugagcagucagcaaca

SEQ ID NO: 36008 - RNA, 23 nt, artificial
  Chemically synthesized
ccuccucuugagcagucagcaac

SEQ ID NO: 36009 - RNA, 23 nt, artificial
  Chemically synthesized
gccuccucuugagcagucagcaa

SEQ ID NO: 36010 - RNA, 23 nt, artificial
  Chemically synthesized
uagaugugcauuuuugugaaaug

SEQ ID NO: 36011 - RNA, 23 nt, artificial
  Chemically synthesized
ggggacugucuuucagauacaug

SEQ ID NO: 36012 - RNA, 23 nt, artificial
  Chemically synthesized
gggggacugucuuucagauacau

SEQ ID NO: 36013 - RNA, 23 nt, artificial
  Chemically synthesized
agggggacugucuuucagauaca

SEQ ID NO: 36014 - RNA, 23 nt, artificial
  Chemically synthesized
ccagacaaauggaggaauaugac

SEQ ID NO: 36015 - RNA, 23 nt, artificial
  Chemically synthesized
agccagacaaauggaggaauaug

SEQ ID NO: 36016 - RNA, 23 nt, artificial
  Chemically synthesized
acaggcaaguccaacucaagguc

SEQ ID NO: 36017 - RNA, 23 nt, artificial
  Chemically synthesized
aacaggcaaguccaacucaaggu

SEQ ID NO: 36018 - RNA, 23 nt, artificial
  Chemically synthesized
uaacaggcaaguccaacucaagg

SEQ ID NO: 36019 - RNA, 23 nt, artificial
  Chemically synthesized
uuaacaggcaaguccaacucaag

SEQ ID NO: 36020 - RNA, 23 nt, artificial
  Chemically synthesized
gagaccacaggguucaaaauguc

SEQ ID NO: 36021 - RNA, 23 nt, artificial
  Chemically synthesized
ugagaccacaggguucaaaaugu

SEQ ID NO: 36022 - RNA, 23 nt, artificial
  Chemically synthesized
uugagaccacaggguucaaaaug

SEQ ID NO: 36023 - RNA, 23 nt, artificial
  Chemically synthesized
agcucuuccaccuacagaaggag

SEQ ID NO: 36024 - RNA, 23 nt, artificial
  Chemically synthesized
ucagcucuuccaccuacagaagg

SEQ ID NO: 36025 - RNA, 23 nt, artificial
  Chemically synthesized
uucagcucuuccaccuacagaag

SEQ ID NO: 36026 - RNA, 23 nt, artificial
  Chemically synthesized
uuuggggacucauuucauuccua

SEQ ID NO: 36027 - RNA, 23 nt, artificial
  Chemically synthesized
gugaaaugaaaacauguaauaaa

SEQ ID NO: 36028 - RNA, 23 nt, artificial
  Chemically synthesized
ugugaaaugaaaacauguaauaa

SEQ ID NO: 36029 - RNA, 23 nt, artificial
  Chemically synthesized
uugugaaaugaaaacauguaaua

SEQ ID NO: 36030 - RNA, 23 nt, artificial
  Chemically synthesized
uuugugaaaugaaaacauguaau

SEQ ID NO: 36031 - RNA, 23 nt, artificial
  Chemically synthesized
uuuugugaaaugaaaacauguaa

SEQ ID NO: 36032 - RNA, 23 nt, artificial
  Chemically synthesized
uggccuugugaucaaugaaacug

SEQ ID NO: 36033 - RNA, 23 nt, artificial
  Chemically synthesized
guggccuugugaucaaugaaacu

SEQ ID NO: 36034 - RNA, 23 nt, artificial
  Chemically synthesized
gccucuacaggacugagaagaag

SEQ ID NO: 36035 - RNA, 23 nt, artificial
  Chemically synthesized
ucagccucuacaggacugagaag

SEQ ID NO: 36036 - RNA, 23 nt, artificial
  Chemically synthesized
ugguucugguugccuugguagga

SEQ ID NO: 36037 - RNA, 23 nt, artificial
  Chemically synthesized
augguucugguugccuugguagg

SEQ ID NO: 36038 - RNA, 23 nt, artificial
  Chemically synthesized
cauuugaggucaaguaagaagac

SEQ ID NO: 36039 - RNA, 23 nt, artificial
  Chemically synthesized
aguauuuaggcagauugaaaagg

SEQ ID NO: 36040 - RNA, 23 nt, artificial
  Chemically synthesized
cccugaagaagagagggaaccac

SEQ ID NO: 36041 - RNA, 23 nt, artificial
  Chemically synthesized
ccccugaagaagagagggaacca

SEQ ID NO: 36042 - RNA, 23 nt, artificial
  Chemically synthesized
accccugaagaagagagggaacc

SEQ ID NO: 36043 - RNA, 23 nt, artificial
  Chemically synthesized
caccccugaagaagagagggaac

SEQ ID NO: 36044 - RNA, 23 nt, artificial
  Chemically synthesized
ccaccccugaagaagagagggaa

SEQ ID NO: 36045 - RNA, 23 nt, artificial
  Chemically synthesized
aaagagagaauguagauauugug

SEQ ID NO: 36046 - RNA, 23 nt, artificial
  Chemically synthesized
uaaagagagaauguagauauugu

SEQ ID NO: 36047 - RNA, 23 nt, artificial
  Chemically synthesized
cuaaagagagaauguagauauug

SEQ ID NO: 36048 - RNA, 23 nt, artificial
  Chemically synthesized
acuaaagagagaauguagauauu

SEQ ID NO: 36049 - RNA, 23 nt, artificial
  Chemically synthesized
uaccagguguucuacacucaucu

SEQ ID NO: 36050 - RNA, 23 nt, artificial
  Chemically synthesized
gauguuuuccuauaauauaauaa

SEQ ID NO: 36051 - RNA, 23 nt, artificial
  Chemically synthesized
ugauguuuuccuauaauauaaua

SEQ ID NO: 36052 - RNA, 23 nt, artificial
  Chemically synthesized
augauguuuuccuauaauauaau

SEQ ID NO: 36053 - RNA, 23 nt, artificial
  Chemically synthesized
aaugauguuuuccuauaauauaa

SEQ ID NO: 36054 - RNA, 23 nt, artificial
  Chemically synthesized
uaaugauguuuuccuauaauaua

SEQ ID NO: 36055 - RNA, 23 nt, artificial
  Chemically synthesized
cuaaugauguuuuccuauaauau

SEQ ID NO: 36056 - RNA, 23 nt, artificial
  Chemically synthesized
acuaaugauguuuuccuauaaua

SEQ ID NO: 36057 - RNA, 23 nt, artificial
  Chemically synthesized
uacuaaugauguuuuccuauaau

SEQ ID NO: 36058 - RNA, 23 nt, artificial
  Chemically synthesized
cuacuaaugauguuuuccuauaa

SEQ ID NO: 36059 - RNA, 23 nt, artificial
  Chemically synthesized
ugaaguacauauuaggaaaauau

SEQ ID NO: 36060 - RNA, 23 nt, artificial
  Chemically synthesized
gugaaguacauauuaggaaaaua

SEQ ID NO: 36061 - RNA, 23 nt, artificial
  Chemically synthesized
ugugaaguacauauuaggaaaau

SEQ ID NO: 36062 - RNA, 23 nt, artificial
  Chemically synthesized
uugugaaguacauauuaggaaaa

SEQ ID NO: 36063 - RNA, 23 nt, artificial
  Chemically synthesized
auugugaaguacauauuaggaaa

SEQ ID NO: 36064 - RNA, 23 nt, artificial
  Chemically synthesized
uacaugguugugaccugaggauu

SEQ ID NO: 36065 - RNA, 23 nt, artificial
  Chemically synthesized
guugugaccugaggauuuaaggg

SEQ ID NO: 36066 - RNA, 23 nt, artificial
  Chemically synthesized
agacaaauggaggaauaugacgg

SEQ ID NO: 36067 - RNA, 23 nt, artificial
  Chemically synthesized
agcuaaagaggcugaaagaggcc

SEQ ID NO: 36068 - RNA, 23 nt, artificial
  Chemically synthesized
aagcuaaagaggcugaaagaggc

SEQ ID NO: 36069 - RNA, 23 nt, artificial
  Chemically synthesized
uaagcuaaagaggcugaaagagg

SEQ ID NO: 36070 - RNA, 23 nt, artificial
  Chemically synthesized
auaagcuaaagaggcugaaagag

SEQ ID NO: 36071 - RNA, 23 nt, artificial
  Chemically synthesized
aauaagcuaaagaggcugaaaga

SEQ ID NO: 36072 - RNA, 23 nt, artificial
  Chemically synthesized
ccagugcugaucauuuauauguc

SEQ ID NO: 36073 - RNA, 23 nt, artificial
  Chemically synthesized
accagugcugaucauuuauaugu

SEQ ID NO: 36074 - RNA, 23 nt, artificial
  Chemically synthesized
uaccagugcugaucauuuauaug

SEQ ID NO: 36075 - RNA, 23 nt, artificial
  Chemically synthesized
gcagcuaccagguguucuacacu

SEQ ID NO: 36076 - RNA, 23 nt, artificial
  Chemically synthesized
agcagcuaccagguguucuacac

SEQ ID NO: 36077 - RNA, 23 nt, artificial
  Chemically synthesized
aagcagcuaccagguguucuaca

SEQ ID NO: 36078 - RNA, 23 nt, artificial
  Chemically synthesized
aaagcagcuaccagguguucuac

SEQ ID NO: 36079 - RNA, 23 nt, artificial
  Chemically synthesized
ucuacaugaggaacucuaaguau

SEQ ID NO: 36080 - RNA, 23 nt, artificial
  Chemically synthesized
gucuacaugaggaacucuaagua

SEQ ID NO: 36081 - RNA, 23 nt, artificial
  Chemically synthesized
ugggauucuuuccauuaugauuc

SEQ ID NO: 36082 - RNA, 23 nt, artificial
  Chemically synthesized
gcuauggaaacucuauaagagag

SEQ ID NO: 36083 - RNA, 23 nt, artificial
  Chemically synthesized
uagcuauggaaacucuauaagag

SEQ ID NO: 36084 - RNA, 23 nt, artificial
  Chemically synthesized
cccaggaucuggugaugauggag

SEQ ID NO: 36085 - RNA, 23 nt, artificial
  Chemically synthesized
ccccaggaucuggugaugaugga

SEQ ID NO: 36086 - RNA, 23 nt, artificial
  Chemically synthesized
uccccaggaucuggugaugaugg

SEQ ID NO: 36087 - RNA, 23 nt, artificial
  Chemically synthesized
auccccaggaucuggugaugaug

SEQ ID NO: 36088 - RNA, 23 nt, artificial
  Chemically synthesized
uauccccaggaucuggugaugau

SEQ ID NO: 36089 - RNA, 23 nt, artificial
  Chemically synthesized
aauagugcuuaaaaaucauugau

SEQ ID NO: 36090 - RNA, 23 nt, artificial
  Chemically synthesized
uaauagugcuuaaaaaucauuga

SEQ ID NO: 36091 - RNA, 23 nt, artificial
  Chemically synthesized
cuaauagugcuuaaaaaucauug

SEQ ID NO: 36092 - RNA, 23 nt, artificial
  Chemically synthesized
ucuaauagugcuuaaaaaucauu

SEQ ID NO: 36093 - RNA, 23 nt, artificial
  Chemically synthesized
aaugcuuccugacaaucaacucu

SEQ ID NO: 36094 - RNA, 23 nt, artificial
  Chemically synthesized
gaaugcuuccugacaaucaacuc

SEQ ID NO: 36095 - RNA, 23 nt, artificial
  Chemically synthesized
ugaaugcuuccugacaaucaacu

SEQ ID NO: 36096 - RNA, 23 nt, artificial
  Chemically synthesized
uugaaugcuuccugacaaucaac

SEQ ID NO: 36097 - RNA, 23 nt, artificial
  Chemically synthesized
uuaagggauggaaaaggaagacu

SEQ ID NO: 36098 - RNA, 23 nt, artificial
  Chemically synthesized
uuuaagggauggaaaaggaagac

SEQ ID NO: 36099 - RNA, 23 nt, artificial
  Chemically synthesized
caugcagcagcccuucaauuacc

SEQ ID NO: 36100 - RNA, 23 nt, artificial
  Chemically synthesized
ccaugcagcagcccuucaauuac

SEQ ID NO: 36101 - RNA, 23 nt, artificial
  Chemically synthesized
ugccaugcagcagcccuucaauu

SEQ ID NO: 36102 - RNA, 23 nt, artificial
  Chemically synthesized
cugccaugcagcagcccuucaau

SEQ ID NO: 36103 - RNA, 23 nt, artificial
  Chemically synthesized
uuccugacaaucaacucuaauag

SEQ ID NO: 36104 - RNA, 23 nt, artificial
  Chemically synthesized
uugaaaaggacaccuuuuaacuc

SEQ ID NO: 36105 - RNA, 23 nt, artificial
  Chemically synthesized
auugaaaaggacaccuuuuaacu

SEQ ID NO: 36106 - RNA, 23 nt, artificial
  Chemically synthesized
auuuggucaagauuuugaaugcu

SEQ ID NO: 36107 - RNA, 23 nt, artificial
  Chemically synthesized
cauuuggucaagauuuugaaugc

SEQ ID NO: 36108 - RNA, 23 nt, artificial
  Chemically synthesized
caacucaccuaauguuuaugagc

SEQ ID NO: 36109 - RNA, 23 nt, artificial
  Chemically synthesized
ucaacucaccuaauguuuaugag

SEQ ID NO: 36110 - RNA, 23 nt, artificial
  Chemically synthesized
ccucaacucaccuaauguuuaug

SEQ ID NO: 36111 - RNA, 23 nt, artificial
  Chemically synthesized
cacagcaucaucuuuggagaagc

SEQ ID NO: 36112 - RNA, 23 nt, artificial
  Chemically synthesized
acacagcaucaucuuuggagaag

SEQ ID NO: 36113 - RNA, 23 nt, artificial
  Chemically synthesized
cuuagcuauggaaacucuauaag

SEQ ID NO: 36114 - RNA, 23 nt, artificial
  Chemically synthesized
auauggguugcauuuggucaaga

SEQ ID NO: 36115 - RNA, 23 nt, artificial
  Chemically synthesized
acacucaucuuagugccugagag

SEQ ID NO: 36116 - RNA, 23 nt, artificial
  Chemically synthesized
uacacucaucuuagugccugaga

SEQ ID NO: 36117 - RNA, 23 nt, artificial
  Chemically synthesized
cuacacucaucuuagugccugag

SEQ ID NO: 36118 - RNA, 23 nt, artificial
  Chemically synthesized
gcacaguucuucccuguccaacc

SEQ ID NO: 36119 - RNA, 23 nt, artificial
  Chemically synthesized
ggcacaguucuucccuguccaac

SEQ ID NO: 36120 - RNA, 23 nt, artificial
  Chemically synthesized
caggcacaguucuucccugucca

SEQ ID NO: 36121 - RNA, 23 nt, artificial
  Chemically synthesized
ugggaagacaccuauggaauugu

SEQ ID NO: 36122 - RNA, 23 nt, artificial
  Chemically synthesized
augggaagacaccuauggaauug

SEQ ID NO: 36123 - RNA, 23 nt, artificial
  Chemically synthesized
gaaaugaaaacauguaauaaaaa

SEQ ID NO: 36124 - RNA, 23 nt, artificial
  Chemically synthesized
ugaaaugaaaacauguaauaaaa

SEQ ID NO: 36125 - RNA, 23 nt, artificial
  Chemically synthesized
caucuuuggagaagcaaauaggc

SEQ ID NO: 36126 - RNA, 23 nt, artificial
  Chemically synthesized
ucaucuuuggagaagcaaauagg

SEQ ID NO: 36127 - RNA, 23 nt, artificial
  Chemically synthesized
aucaucuuuggagaagcaaauag

SEQ ID NO: 36128 - RNA, 23 nt, artificial
  Chemically synthesized
ugcuuucuggagugaaguauaag

SEQ ID NO: 36129 - RNA, 23 nt, artificial
  Chemically synthesized
uagauauugugaaguacauauua

SEQ ID NO: 36130 - RNA, 23 nt, artificial
  Chemically synthesized
guagauauugugaaguacauauu

SEQ ID NO: 36131 - RNA, 23 nt, artificial
  Chemically synthesized
uguagauauugugaaguacauau

SEQ ID NO: 36132 - RNA, 23 nt, artificial
  Chemically synthesized
auguagauauugugaaguacaua

SEQ ID NO: 36133 - RNA, 23 nt, artificial
  Chemically synthesized
aauguagauauugugaaguacau

SEQ ID NO: 36134 - RNA, 23 nt, artificial
  Chemically synthesized
uagcuccucaacucaccuaaugu

SEQ ID NO: 36135 - RNA, 23 nt, artificial
  Chemically synthesized
guagcuccucaacucaccuaaug

SEQ ID NO: 36136 - RNA, 23 nt, artificial
  Chemically synthesized
aauauggguugcauuuggucaag

SEQ ID NO: 36137 - RNA, 23 nt, artificial
  Chemically synthesized
caggcaaguccaacucaaggucc

SEQ ID NO: 36138 - RNA, 23 nt, artificial
  Chemically synthesized
aaaaguauauguuaggauacaaa

SEQ ID NO: 36139 - RNA, 23 nt, artificial
  Chemically synthesized
aaaaaguauauguuaggauacaa

SEQ ID NO: 36140 - RNA, 23 nt, artificial
  Chemically synthesized
uaaaaaguauauguuaggauaca

SEQ ID NO: 36141 - RNA, 23 nt, artificial
  Chemically synthesized
auaaaaaguauauguuaggauac

SEQ ID NO: 36142 - RNA, 23 nt, artificial
  Chemically synthesized
aauaaaaaguauauguuaggaua

SEQ ID NO: 36143 - RNA, 23 nt, artificial
  Chemically synthesized
gcuugcauaauaagcuaaagagg

SEQ ID NO: 36144 - RNA, 23 nt, artificial
  Chemically synthesized
ggcuugcauaauaagcuaaagag

SEQ ID NO: 36145 - RNA, 23 nt, artificial
  Chemically synthesized
agauauugugaaguacauauuag

SEQ ID NO: 36146 - RNA, 23 nt, artificial
  Chemically synthesized
ucauugauugucagcuacuaaug

SEQ ID NO: 36147 - RNA, 23 nt, artificial
  Chemically synthesized
ggauucuuuccauuaugauucuu

SEQ ID NO: 36148 - RNA, 23 nt, artificial
  Chemically synthesized
agugcuuaaaaaucauugauugu

SEQ ID NO: 36149 - RNA, 23 nt, artificial
  Chemically synthesized
uagugcuuaaaaaucauugauug

SEQ ID NO: 36150 - RNA, 23 nt, artificial
  Chemically synthesized
auagugcuuaaaaaucauugauu

SEQ ID NO: 36151 - RNA, 23 nt, artificial
  Chemically synthesized
uaugacuaaagagagaauguaga

SEQ ID NO: 36152 - RNA, 23 nt, artificial
  Chemically synthesized
guaugacuaaagagagaauguag

SEQ ID NO: 36153 - RNA, 23 nt, artificial
  Chemically synthesized
uguaugacuaaagagagaaugua

SEQ ID NO: 36154 - RNA, 23 nt, artificial
  Chemically synthesized
uugauugucagcuacuaaugaug

SEQ ID NO: 36155 - RNA, 23 nt, artificial
  Chemically synthesized
uccugcuuucuggagugaaguau

SEQ ID NO: 36156 - RNA, 23 nt, artificial
  Chemically synthesized
uguccugcuuucuggagugaagu

SEQ ID NO: 36157 - RNA, 23 nt, artificial
  Chemically synthesized
uuguccugcuuucuggagugaag

SEQ ID NO: 36158 - RNA, 23 nt, artificial
  Chemically synthesized
ucuugagcagucagcaacagggu

SEQ ID NO: 36159 - RNA, 23 nt, artificial
  Chemically synthesized
cucuugagcagucagcaacaggg

SEQ ID NO: 36160 - RNA, 23 nt, artificial
  Chemically synthesized
caugccucuggaaugggaagaca

SEQ ID NO: 36161 - RNA, 23 nt, artificial
  Chemically synthesized
ccaugccucuggaaugggaagac

SEQ ID NO: 36162 - RNA, 23 nt, artificial
  Chemically synthesized
uccaugccucuggaaugggaaga

SEQ ID NO: 36163 - RNA, 23 nt, artificial
  Chemically synthesized
guccaugccucuggaaugggaag

SEQ ID NO: 36164 - RNA, 23 nt, artificial
  Chemically synthesized
gguccaugccucuggaaugggaa

SEQ ID NO: 36165 - RNA, 23 nt, artificial
  Chemically synthesized
cauuuaacaggcaaguccaacuc

SEQ ID NO: 36166 - RNA, 23 nt, artificial
  Chemically synthesized
cccauuuaacaggcaaguccaac

SEQ ID NO: 36167 - RNA, 23 nt, artificial
  Chemically synthesized
ggaaaauauggguugcauuuggu

SEQ ID NO: 36168 - RNA, 23 nt, artificial
  Chemically synthesized
uaggaaaauauggguugcauuug

SEQ ID NO: 36169 - RNA, 23 nt, artificial
  Chemically synthesized
auuaggaaaauauggguugcauu

SEQ ID NO: 36170 - RNA, 23 nt, artificial
  Chemically synthesized
ugccaugugaagagggagaagca

SEQ ID NO: 36171 - RNA, 23 nt, artificial
  Chemically synthesized
gcccuucaauuacccauaucccc

SEQ ID NO: 36172 - RNA, 23 nt, artificial
  Chemically synthesized
uaacagauaagcaagagagaugu

SEQ ID NO: 36173 - RNA, 23 nt, artificial
  Chemically synthesized
acuaacagauaagcaagagagau

SEQ ID NO: 36174 - RNA, 23 nt, artificial
  Chemically synthesized
gagggucuucuuacaugcauuug

SEQ ID NO: 36175 - RNA, 23 nt, artificial
  Chemically synthesized
gaaguacauauuaggaaaauaug

SEQ ID NO: 36176 - RNA, 23 nt, artificial
  Chemically synthesized
uauugugaaguacauauuaggaa

SEQ ID NO: 36177 - RNA, 23 nt, artificial
  Chemically synthesized
auauugugaaguacauauuagga

SEQ ID NO: 36178 - RNA, 23 nt, artificial
  Chemically synthesized
gcagaacuccgagagucuaccag

SEQ ID NO: 36179 - RNA, 23 nt, artificial
  Chemically synthesized
ggcagaacuccgagagucuacca

SEQ ID NO: 36180 - RNA, 23 nt, artificial
  Chemically synthesized
uggcagaacuccgagagucuacc

SEQ ID NO: 36181 - RNA, 23 nt, artificial
  Chemically synthesized
cuggcagaacuccgagagucuac

SEQ ID NO: 36182 - RNA, 23 nt, artificial
  Chemically synthesized
gcuggcagaacuccgagagucua

SEQ ID NO: 36183 - RNA, 23 nt, artificial
  Chemically synthesized
gauggaaaaggaagacuagaggc

SEQ ID NO: 36184 - RNA, 23 nt, artificial
  Chemically synthesized
ggaagacaccuauggaauugucc

SEQ ID NO: 36185 - RNA, 23 nt, artificial
  Chemically synthesized
gggaagacaccuauggaauuguc

SEQ ID NO: 36186 - RNA, 23 nt, artificial
  Chemically synthesized
cuuuguauauuccaaaguauacu

SEQ ID NO: 36187 - RNA, 23 nt, artificial
  Chemically synthesized
acuuuguauauuccaaaguauac

SEQ ID NO: 36188 - RNA, 23 nt, artificial
  Chemically synthesized
uacuuuguauauuccaaaguaua

SEQ ID NO: 36189 - RNA, 23 nt, artificial
  Chemically synthesized
guacuuuguauauuccaaaguau

SEQ ID NO: 36190 - RNA, 23 nt, artificial
  Chemically synthesized
uguacuuuguauauuccaaagua

SEQ ID NO: 36191 - RNA, 23 nt, artificial
  Chemically synthesized
uauuuaggcagauugaaaaggac

SEQ ID NO: 36192 - RNA, 23 nt, artificial
  Chemically synthesized
cugagcucucucuggucaauuuu

SEQ ID NO: 36193 - RNA, 23 nt, artificial
  Chemically synthesized
ucugagcucucucuggucaauuu

SEQ ID NO: 36194 - RNA, 23 nt, artificial
  Chemically synthesized
aucugagcucucucuggucaauu

SEQ ID NO: 36195 - RNA, 23 nt, artificial
  Chemically synthesized
ggggcaguguucaaucuuaccag

SEQ ID NO: 36196 - RNA, 23 nt, artificial
  Chemically synthesized
gggggcaguguucaaucuuacca

SEQ ID NO: 36197 - RNA, 23 nt, artificial
  Chemically synthesized
ugggggcaguguucaaucuuacc

SEQ ID NO: 36198 - RNA, 23 nt, artificial
  Chemically synthesized
cugggggcaguguucaaucuuac

SEQ ID NO: 36199 - RNA, 23 nt, artificial
  Chemically synthesized
cuguacuuuguauauuccaaagu

SEQ ID NO: 36200 - RNA, 23 nt, artificial
  Chemically synthesized
gcuguacuuuguauauuccaaag

SEQ ID NO: 36201 - RNA, 23 nt, artificial
  Chemically synthesized
guuucccuuagcuauggaaacuc

SEQ ID NO: 36202 - RNA, 23 nt, artificial
  Chemically synthesized
uguuucccuuagcuauggaaacu

SEQ ID NO: 36203 - RNA, 23 nt, artificial
  Chemically synthesized
guguuucccuuagcuauggaaac

SEQ ID NO: 36204 - RNA, 23 nt, artificial
  Chemically synthesized
uuuuugugaaaugaaaacaugua

SEQ ID NO: 36205 - RNA, 23 nt, artificial
  Chemically synthesized
ccuugugaucaaugaaacugggc

SEQ ID NO: 36206 - RNA, 23 nt, artificial
  Chemically synthesized
gccuugugaucaaugaaacuggg

SEQ ID NO: 36207 - RNA, 23 nt, artificial
  Chemically synthesized
ccuuuuaacucaccucucaaggu

SEQ ID NO: 36208 - RNA, 23 nt, artificial
  Chemically synthesized
accuuuuaacucaccucucaagg

SEQ ID NO: 36209 - RNA, 23 nt, artificial
  Chemically synthesized
caccuuuuaacucaccucucaag

SEQ ID NO: 36210 - RNA, 23 nt, artificial
  Chemically synthesized
gacaccuuuuaacucaccucuca

SEQ ID NO: 36211 - RNA, 23 nt, artificial
  Chemically synthesized
ucuuaccagugcugaucauuuau

SEQ ID NO: 36212 - RNA, 23 nt, artificial
  Chemically synthesized
caagauuuugaaugcuuccugac

SEQ ID NO: 36213 - RNA, 23 nt, artificial
  Chemically synthesized
cuuuuaacucaccucucaaggug

SEQ ID NO: 36214 - RNA, 23 nt, artificial
  Chemically synthesized
agagaauguagauauugugaagu

SEQ ID NO: 36215 - RNA, 23 nt, artificial
  Chemically synthesized
aguacauauuaggaaaauauggg

SEQ ID NO: 36216 - RNA, 23 nt, artificial
  Chemically synthesized
aaguacauauuaggaaaauaugg

SEQ ID NO: 36217 - RNA, 23 nt, artificial
  Chemically synthesized
aggaucuggugaugauggagggg

SEQ ID NO: 36218 - RNA, 23 nt, artificial
  Chemically synthesized
caggaucuggugaugauggaggg

SEQ ID NO: 36219 - RNA, 23 nt, artificial
  Chemically synthesized
ccaggaucuggugaugauggagg

SEQ ID NO: 36220 - RNA, 23 nt, artificial
  Chemically synthesized
aaaaaaaggagcugaggaaagug

SEQ ID NO: 36221 - RNA, 23 nt, artificial
  Chemically synthesized
augacggaagaacauagaacucu

SEQ ID NO: 36222 - RNA, 23 nt, artificial
  Chemically synthesized
uaugacggaagaacauagaacuc

SEQ ID NO: 36223 - RNA, 23 nt, artificial
  Chemically synthesized
ugccugagaguauuuaggcagau

SEQ ID NO: 36224 - RNA, 23 nt, artificial
  Chemically synthesized
agaauguagauauugugaaguac

SEQ ID NO: 36225 - RNA, 23 nt, artificial
  Chemically synthesized
ucaaucuuaccagugcugaucau

SEQ ID NO: 36226 - RNA, 23 nt, artificial
  Chemically synthesized
uucaaucuuaccagugcugauca

SEQ ID NO: 36227 - RNA, 23 nt, artificial
  Chemically synthesized
guucaaucuuaccagugcugauc

SEQ ID NO: 36228 - RNA, 23 nt, artificial
  Chemically synthesized
uucccuuagcuauggaaacucua

SEQ ID NO: 36229 - RNA, 23 nt, artificial
  Chemically synthesized
uggagugaaguauaagaagggug

SEQ ID NO: 36230 - RNA, 23 nt, artificial
  Chemically synthesized
uauauaagcucuaagagaagcac

SEQ ID NO: 36231 - RNA, 23 nt, artificial
  Chemically synthesized
uuauauaagcucuaagagaagca

SEQ ID NO: 36232 - RNA, 23 nt, artificial
  Chemically synthesized
cuuauauaagcucuaagagaagc

SEQ ID NO: 36233 - RNA, 23 nt, artificial
  Chemically synthesized
aaguccaacucaagguccaugcc

SEQ ID NO: 36234 - RNA, 23 nt, artificial
  Chemically synthesized
caaguccaacucaagguccaugc

SEQ ID NO: 36235 - RNA, 23 nt, artificial
  Chemically synthesized
gcugaucauuuauaugucaacgu

SEQ ID NO: 36236 - RNA, 23 nt, artificial
  Chemically synthesized
ugcugaucauuuauaugucaacg

SEQ ID NO: 36237 - RNA, 23 nt, artificial
  Chemically synthesized
gugcugaucauuuauaugucaac

SEQ ID NO: 36238 - RNA, 23 nt, artificial
  Chemically synthesized
cugaagaagagagggaaccacag

SEQ ID NO: 36239 - RNA, 23 nt, artificial
  Chemically synthesized
ucauuuauaugucaacguaucug

SEQ ID NO: 36240 - RNA, 23 nt, artificial
  Chemically synthesized
aucauuuauaugucaacguaucu

SEQ ID NO: 36241 - RNA, 23 nt, artificial
  Chemically synthesized
ugaucauuuauaugucaacguau

SEQ ID NO: 36242 - RNA, 23 nt, artificial
  Chemically synthesized
aauaugacggaagaacauagaac

SEQ ID NO: 36243 - RNA, 23 nt, artificial
  Chemically synthesized
ggucaaguaagaagacaugaacc

SEQ ID NO: 36244 - RNA, 23 nt, artificial
  Chemically synthesized
guaagaagacaugaaccaagugg

SEQ ID NO: 36245 - RNA, 23 nt, artificial
  Chemically synthesized
aguaagaagacaugaaccaagug

SEQ ID NO: 36246 - RNA, 23 nt, artificial
  Chemically synthesized
auuuaacaggcaaguccaacuca

SEQ ID NO: 36247 - RNA, 23 nt, artificial
  Chemically synthesized
cuggaaugggaagacaccuaugg

SEQ ID NO: 36248 - RNA, 23 nt, artificial
  Chemically synthesized
ucuggaaugggaagacaccuaug

SEQ ID NO: 36249 - RNA, 23 nt, artificial
  Chemically synthesized
cugggcuguacuuuguauauucc

SEQ ID NO: 36250 - RNA, 23 nt, artificial
  Chemically synthesized
acugggcuguacuuuguauauuc

SEQ ID NO: 36251 - RNA, 23 nt, artificial
  Chemically synthesized
aacugggcuguacuuuguauauu

SEQ ID NO: 36252 - RNA, 23 nt, artificial
  Chemically synthesized
cggaagaacauagaacucugggc

SEQ ID NO: 36253 - RNA, 23 nt, artificial
  Chemically synthesized
acggaagaacauagaacucuggg

SEQ ID NO: 36254 - RNA, 23 nt, artificial
  Chemically synthesized
cugacaaucaacucuaauagugc

SEQ ID NO: 36255 - RNA, 23 nt, artificial
  Chemically synthesized
ccugacaaucaacucuaauagug

SEQ ID NO: 36256 - RNA, 23 nt, artificial
  Chemically synthesized
aguggaccuugagaccacagggu

SEQ ID NO: 36257 - RNA, 23 nt, artificial
  Chemically synthesized
aaguggaccuugagaccacaggg

SEQ ID NO: 36258 - RNA, 23 nt, artificial
  Chemically synthesized
caaguggaccuugagaccacagg

SEQ ID NO: 36259 - RNA, 23 nt, artificial
  Chemically synthesized
ccaaguggaccuugagaccacag

SEQ ID NO: 36260 - RNA, 23 nt, artificial
  Chemically synthesized
accaaguggaccuugagaccaca

SEQ ID NO: 36261 - RNA, 23 nt, artificial
  Chemically synthesized
ugugauguuuuucaugguucugg

SEQ ID NO: 36262 - RNA, 23 nt, artificial
  Chemically synthesized
uugugauguuuuucaugguucug

SEQ ID NO: 36263 - RNA, 23 nt, artificial
  Chemically synthesized
uauuuccagugcaauuguagggg

SEQ ID NO: 36264 - RNA, 23 nt, artificial
  Chemically synthesized
guauuuccagugcaauuguaggg

SEQ ID NO: 36265 - RNA, 23 nt, artificial
  Chemically synthesized
uguauuuccagugcaauuguagg

SEQ ID NO: 36266 - RNA, 23 nt, artificial
  Chemically synthesized
guguauuuccagugcaauuguag

SEQ ID NO: 36267 - RNA, 23 nt, artificial
  Chemically synthesized
ugaccugaggauuuaagggaugg

SEQ ID NO: 36268 - RNA, 23 nt, artificial
  Chemically synthesized
gugaccugaggauuuaagggaug

SEQ ID NO: 36269 - RNA, 23 nt, artificial
  Chemically synthesized
ugugaccugaggauuuaagggau

SEQ ID NO: 36270 - RNA, 23 nt, artificial
  Chemically synthesized
ugaaccaaguggaccuugagacc

SEQ ID NO: 36271 - RNA, 23 nt, artificial
  Chemically synthesized
augaaccaaguggaccuugagac

SEQ ID NO: 36272 - RNA, 23 nt, artificial
  Chemically synthesized
acaugaaccaaguggaccuugag

SEQ ID NO: 36273 - RNA, 23 nt, artificial
  Chemically synthesized
acaugaggaacucuaaguauccc

SEQ ID NO: 36274 - RNA, 23 nt, artificial
  Chemically synthesized
uacaugaggaacucuaaguaucc

SEQ ID NO: 36275 - RNA, 23 nt, artificial
  Chemically synthesized
cuacaugaggaacucuaaguauc

SEQ ID NO: 36276 - RNA, 23 nt, artificial
  Chemically synthesized
agugccugagaguauuuaggcag

SEQ ID NO: 36277 - RNA, 23 nt, artificial
  Chemically synthesized
uagugccugagaguauuuaggca

SEQ ID NO: 36278 - RNA, 23 nt, artificial
  Chemically synthesized
acaaggucuacaugaggaacucu

SEQ ID NO: 36279 - RNA, 23 nt, artificial
  Chemically synthesized
cacaaggucuacaugaggaacuc

SEQ ID NO: 36280 - RNA, 23 nt, artificial
  Chemically synthesized
gccacaaggucuacaugaggaac

SEQ ID NO: 36281 - RNA, 23 nt, artificial
  Chemically synthesized
guucuacacucaucuuagugccu

SEQ ID NO: 36282 - RNA, 23 nt, artificial
  Chemically synthesized
uguucuacacucaucuuagugcc

SEQ ID NO: 36283 - RNA, 23 nt, artificial
  Chemically synthesized
guguucuacacucaucuuagugc

SEQ ID NO: 36284 - RNA, 23 nt, artificial
  Chemically synthesized
gguguucuacacucaucuuagug

SEQ ID NO: 36285 - RNA, 23 nt, artificial
  Chemically synthesized
auuugaggucaaguaagaagaca

SEQ ID NO: 36286 - RNA, 23 nt, artificial
  Chemically synthesized
aguccaacucaagguccaugccu

SEQ ID NO: 36287 - RNA, 23 nt, artificial
  Chemically synthesized
ucuggucaauuuugaggaaucuc

SEQ ID NO: 36288 - RNA, 23 nt, artificial
  Chemically synthesized
ucucuggucaauuuugaggaauc

SEQ ID NO: 36289 - RNA, 23 nt, artificial
  Chemically synthesized
cucucuggucaauuuugaggaau

SEQ ID NO: 36290 - RNA, 23 nt, artificial
  Chemically synthesized
ucucucuggucaauuuugaggaa

SEQ ID NO: 36291 - RNA, 23 nt, artificial
  Chemically synthesized
aggcaccgagaauguuguauuca

SEQ ID NO: 36292 - RNA, 23 nt, artificial
  Chemically synthesized
caggcaccgagaauguuguauuc

SEQ ID NO: 36293 - RNA, 23 nt, artificial
  Chemically synthesized
uacaggcaccgagaauguuguau

SEQ ID NO: 36294 - RNA, 23 nt, artificial
  Chemically synthesized
uuacaggcaccgagaauguugua

SEQ ID NO: 36295 - RNA, 23 nt, artificial
  Chemically synthesized
caugaaaaagcagcuaccaggug

SEQ ID NO: 36296 - RNA, 23 nt, artificial
  Chemically synthesized
agcaugaaaaagcagcuaccagg

SEQ ID NO: 36297 - RNA, 23 nt, artificial
  Chemically synthesized
aagcaugaaaaagcagcuaccag

SEQ ID NO: 36298 - RNA, 23 nt, artificial
  Chemically synthesized
cugccaugugaagagggagaagc

SEQ ID NO: 36299 - RNA, 23 nt, artificial
  Chemically synthesized
gcugccaugugaagagggagaag

SEQ ID NO: 36300 - RNA, 23 nt, artificial
  Chemically synthesized
aagaagagagggaaccacagcac

SEQ ID NO: 36301 - RNA, 23 nt, artificial
  Chemically synthesized
cuuucagauacaugguugugacc

SEQ ID NO: 36302 - RNA, 23 nt, artificial
  Chemically synthesized
ucuuucagauacaugguugugac

SEQ ID NO: 36303 - RNA, 23 nt, artificial
  Chemically synthesized
ugucuuucagauacaugguugug

SEQ ID NO: 36304 - RNA, 23 nt, artificial
  Chemically synthesized
caauuuugaggaaucucagacgu

SEQ ID NO: 36305 - RNA, 23 nt, artificial
  Chemically synthesized
ucaauuuugaggaaucucagacg

SEQ ID NO: 36306 - RNA, 23 nt, artificial
  Chemically synthesized
gucaauuuugaggaaucucagac

SEQ ID NO: 36307 - RNA, 23 nt, artificial
  Chemically synthesized
uggucaauuuugaggaaucucag

SEQ ID NO: 36308 - RNA, 23 nt, artificial
  Chemically synthesized
cugaucauuuauaugucaacgua

SEQ ID NO: 36309 - RNA, 23 nt, artificial
  Chemically synthesized
auggaaacucuauaagagagauc

SEQ ID NO: 36310 - RNA, 23 nt, artificial
  Chemically synthesized
aggcagauugaaaaggacaccuu

SEQ ID NO: 36311 - RNA, 23 nt, artificial
  Chemically synthesized
uaggcagauugaaaaggacaccu

SEQ ID NO: 36312 - RNA, 23 nt, artificial
  Chemically synthesized
uuaggcagauugaaaaggacacc

SEQ ID NO: 36313 - RNA, 23 nt, artificial
  Chemically synthesized
uuuaggcagauugaaaaggacac

SEQ ID NO: 36314 - RNA, 23 nt, artificial
  Chemically synthesized
caugaggaacucuaaguaucccc

SEQ ID NO: 36315 - RNA, 23 nt, artificial
  Chemically synthesized
acucuauaagagagauccagcuu

SEQ ID NO: 36316 - RNA, 23 nt, artificial
  Chemically synthesized
aacucuauaagagagauccagcu

SEQ ID NO: 36317 - RNA, 23 nt, artificial
  Chemically synthesized
aaacucuauaagagagauccagc

SEQ ID NO: 36318 - RNA, 23 nt, artificial
  Chemically synthesized
gaaacucuauaagagagauccag

SEQ ID NO: 36319 - RNA, 23 nt, artificial
  Chemically synthesized
auggaaaaggaagacuagaggcu

SEQ ID NO: 36320 - RNA, 23 nt, artificial
  Chemically synthesized
agaaggccuggucaaaggaggcc

SEQ ID NO: 36321 - RNA, 23 nt, artificial
  Chemically synthesized
cagaaggccuggucaaaggaggc

SEQ ID NO: 36322 - RNA, 23 nt, artificial
  Chemically synthesized
ccagaaggccuggucaaaggagg

SEQ ID NO: 36323 - RNA, 23 nt, artificial
  Chemically synthesized
cccagaaggccuggucaaaggag

SEQ ID NO: 36324 - RNA, 23 nt, artificial
  Chemically synthesized
gcccagaaggccuggucaaagga

SEQ ID NO: 36325 - RNA, 23 nt, artificial
  Chemically synthesized
uuguauauuccaaaguauacuuc

SEQ ID NO: 36326 - RNA, 23 nt, artificial
  Chemically synthesized
uuuguauauuccaaaguauacuu

SEQ ID NO: 36327 - RNA, 23 nt, artificial
  Chemically synthesized
ggggucaaucuugcaacaaccug

SEQ ID NO: 36328 - RNA, 23 nt, artificial
  Chemically synthesized
cggggucaaucuugcaacaaccu

SEQ ID NO: 36329 - RNA, 23 nt, artificial
  Chemically synthesized
ccggggucaaucuugcaacaacc

SEQ ID NO: 36330 - RNA, 23 nt, artificial
  Chemically synthesized
uccggggucaaucuugcaacaac

SEQ ID NO: 36331 - RNA, 23 nt, artificial
  Chemically synthesized
auguguauuuccagugcaauugu

SEQ ID NO: 36332 - RNA, 23 nt, artificial
  Chemically synthesized
cauguguauuuccagugcaauug

SEQ ID NO: 36333 - RNA, 23 nt, artificial
  Chemically synthesized
aauuuugaggaaucucagacguu

SEQ ID NO: 36334 - RNA, 23 nt, artificial
  Chemically synthesized
gaauuguccugcuuucuggagug

SEQ ID NO: 36335 - RNA, 23 nt, artificial
  Chemically synthesized
uggaauuguccugcuuucuggag

SEQ ID NO: 36336 - RNA, 23 nt, artificial
  Chemically synthesized
gaaaacauguaauaaaaaguaua

SEQ ID NO: 36337 - RNA, 23 nt, artificial
  Chemically synthesized
ugaaaacauguaauaaaaaguau

SEQ ID NO: 36338 - RNA, 23 nt, artificial
  Chemically synthesized
augaaaacauguaauaaaaagua

SEQ ID NO: 36339 - RNA, 23 nt, artificial
  Chemically synthesized
aaugaaaacauguaauaaaaagu

SEQ ID NO: 36340 - RNA, 23 nt, artificial
  Chemically synthesized
aaaugaaaacauguaauaaaaag

SEQ ID NO: 36341 - RNA, 23 nt, artificial
  Chemically synthesized
aagguccaugccucuggaauggg

SEQ ID NO: 36342 - RNA, 23 nt, artificial
  Chemically synthesized
caagguccaugccucuggaaugg

SEQ ID NO: 36343 - RNA, 23 nt, artificial
  Chemically synthesized
ucaagguccaugccucuggaaug

SEQ ID NO: 36344 - RNA, 23 nt, artificial
  Chemically synthesized
gucuccuugugauguuuuucaug

SEQ ID NO: 36345 - RNA, 23 nt, artificial
  Chemically synthesized
ugucuccuugugauguuuuucau

SEQ ID NO: 36346 - RNA, 23 nt, artificial
  Chemically synthesized
ugugucuccuugugauguuuuuc

SEQ ID NO: 36347 - RNA, 23 nt, artificial
  Chemically synthesized
uggaaacucuauaagagagaucc

SEQ ID NO: 36348 - RNA, 23 nt, artificial
  Chemically synthesized
agaauguuguauucagugagggu

SEQ ID NO: 36349 - RNA, 23 nt, artificial
  Chemically synthesized
gagaauguuguauucagugaggg

SEQ ID NO: 36350 - RNA, 23 nt, artificial
  Chemically synthesized
gucagcuacuaaugauguuuucc

SEQ ID NO: 36351 - RNA, 23 nt, artificial
  Chemically synthesized
ugucagcuacuaaugauguuuuc

SEQ ID NO: 36352 - RNA, 23 nt, artificial
  Chemically synthesized
auugucagcuacuaaugauguuu

SEQ ID NO: 36353 - RNA, 23 nt, artificial
  Chemically synthesized
cuucacuucuaaaugcauauccu

SEQ ID NO: 36354 - RNA, 23 nt, artificial
  Chemically synthesized
ucuucacuucuaaaugcauaucc

SEQ ID NO: 36355 - RNA, 23 nt, artificial
  Chemically synthesized
aucuucacuucuaaaugcauauc

SEQ ID NO: 36356 - RNA, 23 nt, artificial
  Chemically synthesized
uugaggucaaguaagaagacaug

SEQ ID NO: 36357 - RNA, 23 nt, artificial
  Chemically synthesized
uuugaggucaaguaagaagacau

SEQ ID NO: 36358 - RNA, 23 nt, artificial
  Chemically synthesized
uuauguagaugugcauuuuugug

SEQ ID NO: 36359 - RNA, 23 nt, artificial
  Chemically synthesized
uuuauguagaugugcauuuuugu

SEQ ID NO: 36360 - RNA, 23 nt, artificial
  Chemically synthesized
gauucuuuccauuaugauucuuu

SEQ ID NO: 36361 - RNA, 23 nt, artificial
  Chemically synthesized
gaggaaucucagacguuuuucgg

SEQ ID NO: 36362 - RNA, 23 nt, artificial
  Chemically synthesized
ugaggaaucucagacguuuuucg

SEQ ID NO: 36363 - RNA, 23 nt, artificial
  Chemically synthesized
uugaggaaucucagacguuuuuc

SEQ ID NO: 36364 - RNA, 23 nt, artificial
  Chemically synthesized
uuugaggaaucucagacguuuuu

SEQ ID NO: 36365 - RNA, 23 nt, artificial
  Chemically synthesized
uccuugugauguuuuucaugguu

SEQ ID NO: 36366 - RNA, 23 nt, artificial
  Chemically synthesized
cuccuugugauguuuuucauggu

SEQ ID NO: 36367 - RNA, 23 nt, artificial
  Chemically synthesized
ucuccuugugauguuuuucaugg

SEQ ID NO: 36368 - RNA, 23 nt, artificial
  Chemically synthesized
cagaucuacuggguggacagcag

SEQ ID NO: 36369 - RNA, 23 nt, artificial
  Chemically synthesized
ccagaucuacuggguggacagca

SEQ ID NO: 36370 - RNA, 23 nt, artificial
  Chemically synthesized
cccagaucuacuggguggacagc

SEQ ID NO: 36371 - RNA, 23 nt, artificial
  Chemically synthesized
ccccagaucuacuggguggacag

SEQ ID NO: 36372 - RNA, 23 nt, artificial
  Chemically synthesized
uccccagaucuacuggguggaca

SEQ ID NO: 36373 - RNA, 23 nt, artificial
  Chemically synthesized
ucaacguaucugagcucucucug

SEQ ID NO: 36374 - RNA, 23 nt, artificial
  Chemically synthesized
gucaacguaucugagcucucucu

SEQ ID NO: 36375 - RNA, 23 nt, artificial
  Chemically synthesized
ugucaacguaucugagcucucuc

SEQ ID NO: 36376 - RNA, 23 nt, artificial
  Chemically synthesized
augucaacguaucugagcucucu

SEQ ID NO: 36377 - RNA, 23 nt, artificial
  Chemically synthesized
gccucuggaaugggaagacaccu

SEQ ID NO: 36378 - RNA, 23 nt, artificial
  Chemically synthesized
ugccucuggaaugggaagacacc

SEQ ID NO: 36379 - RNA, 23 nt, artificial
  Chemically synthesized
augccucuggaaugggaagacac

SEQ ID NO: 36380 - RNA, 23 nt, artificial
  Chemically synthesized
ucaaugaaacugggcuguacuuu

SEQ ID NO: 36381 - RNA, 23 nt, artificial
  Chemically synthesized
ugaucaaugaaacugggcuguac

SEQ ID NO: 36382 - RNA, 23 nt, artificial
  Chemically synthesized
uaauaagcuaaagaggcugaaag

SEQ ID NO: 36383 - RNA, 23 nt, artificial
  Chemically synthesized
auaauaagcuaaagaggcugaaa

SEQ ID NO: 36384 - RNA, 23 nt, artificial
  Chemically synthesized
ucagauacaugguugugaccuga

SEQ ID NO: 36385 - RNA, 23 nt, artificial
  Chemically synthesized
uucagauacaugguugugaccug

SEQ ID NO: 36386 - RNA, 23 nt, artificial
  Chemically synthesized
uuucagauacaugguugugaccu

SEQ ID NO: 36387 - RNA, 23 nt, artificial
  Chemically synthesized
augcagcagcccuucaauuaccc

SEQ ID NO: 36388 - RNA, 23 nt, artificial
  Chemically synthesized
ccuauggaauuguccugcuuucu

SEQ ID NO: 36389 - RNA, 23 nt, artificial
  Chemically synthesized
acaccuauggaauuguccugcuu

SEQ ID NO: 36390 - RNA, 23 nt, artificial
  Chemically synthesized
uuuuucggcuuauauaagcucua

SEQ ID NO: 36391 - RNA, 23 nt, artificial
  Chemically synthesized
agcuaccagguguucuacacuca

SEQ ID NO: 36392 - RNA, 23 nt, artificial
  Chemically synthesized
aagacaugaaccaaguggaccuu

SEQ ID NO: 36393 - RNA, 23 nt, artificial
  Chemically synthesized
gaagacaugaaccaaguggaccu

SEQ ID NO: 36394 - RNA, 23 nt, artificial
  Chemically synthesized
agaagacaugaaccaaguggacc

SEQ ID NO: 36395 - RNA, 23 nt, artificial
  Chemically synthesized
aagaagacaugaaccaaguggac

SEQ ID NO: 36396 - RNA, 23 nt, artificial
  Chemically synthesized
acuuugggauucuuuccauuaug

SEQ ID NO: 36397 - RNA, 23 nt, artificial
  Chemically synthesized
ucuucuuacaugcauuugagguc

SEQ ID NO: 36398 - RNA, 23 nt, artificial
  Chemically synthesized
gucuucuuacaugcauuugaggu

SEQ ID NO: 36399 - RNA, 23 nt, artificial
  Chemically synthesized
ggucuucuuacaugcauuugagg

SEQ ID NO: 36400 - RNA, 23 nt, artificial
  Chemically synthesized
ucuuacaugcauuugaggucaag

SEQ ID NO: 36401 - RNA, 23 nt, artificial
  Chemically synthesized
acaggguucaaaaugucuguagc

SEQ ID NO: 36402 - RNA, 23 nt, artificial
  Chemically synthesized
cacaggguucaaaaugucuguag

SEQ ID NO: 36403 - RNA, 23 nt, artificial
  Chemically synthesized
accacaggguucaaaaugucugu

SEQ ID NO: 36404 - RNA, 23 nt, artificial
  Chemically synthesized
agaagcaugaaaaagcagcuacc

SEQ ID NO: 36405 - RNA, 23 nt, artificial
  Chemically synthesized
gagaagcaugaaaaagcagcuac

SEQ ID NO: 36406 - RNA, 23 nt, artificial
  Chemically synthesized
aaaaucauugauugucagcuacu

SEQ ID NO: 36407 - RNA, 23 nt, artificial
  Chemically synthesized
aaaaaucauugauugucagcuac

SEQ ID NO: 36408 - RNA, 23 nt, artificial
  Chemically synthesized
uaaaaaucauugauugucagcua

SEQ ID NO: 36409 - RNA, 23 nt, artificial
  Chemically synthesized
agcucucucuggucaauuuugag

SEQ ID NO: 36410 - RNA, 23 nt, artificial
  Chemically synthesized
ugagcucucucuggucaauuuug

SEQ ID NO: 36411 - RNA, 23 nt, artificial
  Chemically synthesized
cuugcauaauaagcuaaagaggc

SEQ ID NO: 36412 - RNA, 23 nt, artificial
  Chemically synthesized
agaagcacuuugggauucuuucc

SEQ ID NO: 36413 - RNA, 23 nt, artificial
  Chemically synthesized
uggucaagauuuugaaugcuucc

SEQ ID NO: 36414 - RNA, 23 nt, artificial
  Chemically synthesized
uuggucaagauuuugaaugcuuc

SEQ ID NO: 36415 - RNA, 23 nt, artificial
  Chemically synthesized
uggcccauuuaacaggcaagucc

SEQ ID NO: 36416 - RNA, 23 nt, artificial
  Chemically synthesized
guggcccauuuaacaggcaaguc

SEQ ID NO: 36417 - RNA, 23 nt, artificial
  Chemically synthesized
aguggcccauuuaacaggcaagu

SEQ ID NO: 36418 - RNA, 23 nt, artificial
  Chemically synthesized
gagugaaguauaagaaggguggc

SEQ ID NO: 36419 - RNA, 23 nt, artificial
  Chemically synthesized
gaaguaaaaccguuugcuggggc

SEQ ID NO: 36420 - RNA, 23 nt, artificial
  Chemically synthesized
agaaguaaaaccguuugcugggg

SEQ ID NO: 36421 - RNA, 23 nt, artificial
  Chemically synthesized
uuucccuuagcuauggaaacucu

SEQ ID NO: 36422 - RNA, 23 nt, artificial
  Chemically synthesized
agcucuaagagaagcacuuuggg

SEQ ID NO: 36423 - RNA, 23 nt, artificial
  Chemically synthesized
aagcucuaagagaagcacuuugg

SEQ ID NO: 36424 - RNA, 23 nt, artificial
  Chemically synthesized
uaagcucuaagagaagcacuuug

SEQ ID NO: 36425 - RNA, 23 nt, artificial
  Chemically synthesized
auaagcucuaagagaagcacuuu

SEQ ID NO: 36426 - RNA, 23 nt, artificial
  Chemically synthesized
uauaagcucuaagagaagcacuu

SEQ ID NO: 36427 - RNA, 23 nt, artificial
  Chemically synthesized
uuguuacaggcaccgagaauguu

SEQ ID NO: 36428 - RNA, 23 nt, artificial
  Chemically synthesized
uuuguuacaggcaccgagaaugu

SEQ ID NO: 36429 - RNA, 23 nt, artificial
  Chemically synthesized
uucuuuguuacaggcaccgagaa

SEQ ID NO: 36430 - RNA, 23 nt, artificial
  Chemically synthesized
aaugucuguagcuccucaacuca

SEQ ID NO: 36431 - RNA, 23 nt, artificial
  Chemically synthesized
aaaugucuguagcuccucaacuc

SEQ ID NO: 36432 - RNA, 23 nt, artificial
  Chemically synthesized
aaaaugucuguagcuccucaacu

SEQ ID NO: 36433 - RNA, 23 nt, artificial
  Chemically synthesized
caaaaugucuguagcuccucaac

SEQ ID NO: 36434 - RNA, 23 nt, artificial
  Chemically synthesized
agcacuuugggauucuuuccauu

SEQ ID NO: 36435 - RNA, 23 nt, artificial
  Chemically synthesized
aaccaaguggaccuugagaccac

SEQ ID NO: 36436 - RNA, 23 nt, artificial
  Chemically synthesized
uguuuuucaugguucugguugcc

SEQ ID NO: 36437 - RNA, 23 nt, artificial
  Chemically synthesized
auguuuuucaugguucugguugc

SEQ ID NO: 36438 - RNA, 23 nt, artificial
  Chemically synthesized
gauguuuuucaugguucugguug

SEQ ID NO: 36439 - RNA, 23 nt, artificial
  Chemically synthesized
auuuugaaugcuuccugacaauc

SEQ ID NO: 36440 - RNA, 23 nt, artificial
  Chemically synthesized
ccccugaaaaaaaggagcugagg

SEQ ID NO: 36441 - RNA, 23 nt, artificial
  Chemically synthesized
cccccugaaaaaaaggagcugag

SEQ ID NO: 36442 - RNA, 23 nt, artificial
  Chemically synthesized
acccccugaaaaaaaggagcuga

SEQ ID NO: 36443 - RNA, 23 nt, artificial
  Chemically synthesized
gggaagaugaugagcuacugcac

SEQ ID NO: 36444 - RNA, 23 nt, artificial
  Chemically synthesized
ggggaagaugaugagcuacugca

SEQ ID NO: 36445 - RNA, 23 nt, artificial
  Chemically synthesized
aggggaagaugaugagcuacugc

SEQ ID NO: 36446 - RNA, 23 nt, artificial
  Chemically synthesized
gaggggaagaugaugagcuacug

SEQ ID NO: 36447 - RNA, 23 nt, artificial
  Chemically synthesized
uguuucagcucuuccaccuacag

SEQ ID NO: 36448 - RNA, 23 nt, artificial
  Chemically synthesized
auguuucagcucuuccaccuaca

SEQ ID NO: 36449 - RNA, 23 nt, artificial
  Chemically synthesized
uaagcaagagagauguuuugggg

SEQ ID NO: 36450 - RNA, 23 nt, artificial
  Chemically synthesized
auaagcaagagagauguuuuggg

SEQ ID NO: 36451 - RNA, 23 nt, artificial
  Chemically synthesized
gauaagcaagagagauguuuugg

SEQ ID NO: 36452 - RNA, 23 nt, artificial
  Chemically synthesized
guucaaaaugucuguagcuccuc

SEQ ID NO: 36453 - RNA, 23 nt, artificial
  Chemically synthesized
ugcuuaaaaaucauugauuguca

SEQ ID NO: 36454 - RNA, 23 nt, artificial
  Chemically synthesized
ugccuccucuugagcagucagca

SEQ ID NO: 36455 - RNA, 23 nt, artificial
  Chemically synthesized
aagggggacugucuuucagauac

SEQ ID NO: 36456 - RNA, 23 nt, artificial
  Chemically synthesized
ugagccaucggugaaacuaacag

SEQ ID NO: 36457 - RNA, 23 nt, artificial
  Chemically synthesized
uugcauaauaagcuaaagaggcu

SEQ ID NO: 36458 - RNA, 23 nt, artificial
  Chemically synthesized
cucucucuggucaauuuugagga

SEQ ID NO: 36459 - RNA, 23 nt, artificial
  Chemically synthesized
gcucucucuggucaauuuugagg

SEQ ID NO: 36460 - RNA, 23 nt, artificial
  Chemically synthesized
augaugagcuacugcacuacugg

SEQ ID NO: 36461 - RNA, 23 nt, artificial
  Chemically synthesized
gaugaugagcuacugcacuacug

SEQ ID NO: 36462 - RNA, 23 nt, artificial
  Chemically synthesized
aagaugaugagcuacugcacuac

SEQ ID NO: 36463 - RNA, 23 nt, artificial
  Chemically synthesized
ugugaucaaugaaacugggcugu

SEQ ID NO: 36464 - RNA, 23 nt, artificial
  Chemically synthesized
uugugaucaaugaaacugggcug

SEQ ID NO: 36465 - RNA, 23 nt, artificial
  Chemically synthesized
gaacuccgagagucuaccagcca

SEQ ID NO: 36466 - RNA, 23 nt, artificial
  Chemically synthesized
agaacuccgagagucuaccagcc

SEQ ID NO: 36467 - RNA, 23 nt, artificial
  Chemically synthesized
cagaacuccgagagucuaccagc

SEQ ID NO: 36468 - RNA, 23 nt, artificial
  Chemically synthesized
gaaaaagcagcuaccagguguuc

SEQ ID NO: 36469 - RNA, 23 nt, artificial
  Chemically synthesized
augaaaaagcagcuaccaggugu

SEQ ID NO: 36470 - RNA, 23 nt, artificial
  Chemically synthesized
agauacaugguugugaccugagg

SEQ ID NO: 36471 - RNA, 23 nt, artificial
  Chemically synthesized
cagauacaugguugugaccugag

SEQ ID NO: 36472 - RNA, 23 nt, artificial
  Chemically synthesized
aagcacuuugggauucuuuccau

SEQ ID NO: 36473 - RNA, 23 nt, artificial
  Chemically synthesized
auuuuugugaaaugaaaacaugu

SEQ ID NO: 36474 - RNA, 23 nt, artificial
  Chemically synthesized
ucuuccaccuacagaaggagcug

SEQ ID NO: 36475 - RNA, 23 nt, artificial
  Chemically synthesized
cucuuccaccuacagaaggagcu

SEQ ID NO: 36476 - RNA, 23 nt, artificial
  Chemically synthesized
gcucuuccaccuacagaaggagc

SEQ ID NO: 36477 - RNA, 23 nt, artificial
  Chemically synthesized
acuucuaaaugcauauccugagc

SEQ ID NO: 36478 - RNA, 23 nt, artificial
  Chemically synthesized
uucacuucuaaaugcauauccug

SEQ ID NO: 36479 - RNA, 23 nt, artificial
  Chemically synthesized
agugaaguauaagaaggguggcc

SEQ ID NO: 36480 - RNA, 23 nt, artificial
  Chemically synthesized
cucaccuaauguuuaugagccag

SEQ ID NO: 36481 - RNA, 23 nt, artificial
  Chemically synthesized
acucaccuaauguuuaugagcca

SEQ ID NO: 36482 - RNA, 23 nt, artificial
  Chemically synthesized
aacucaccuaauguuuaugagcc

SEQ ID NO: 36483 - RNA, 23 nt, artificial
  Chemically synthesized
guguaugacuaaagagagaaugu

SEQ ID NO: 36484 - RNA, 23 nt, artificial
  Chemically synthesized
cugguugccuugguaggauuggg

SEQ ID NO: 36485 - RNA, 23 nt, artificial
  Chemically synthesized
ucugguugccuugguaggauugg

SEQ ID NO: 36486 - RNA, 23 nt, artificial
  Chemically synthesized
uucugguugccuugguaggauug

SEQ ID NO: 36487 - RNA, 23 nt, artificial
  Chemically synthesized
guucugguugccuugguaggauu

SEQ ID NO: 36488 - RNA, 23 nt, artificial
  Chemically synthesized
ggucaaucuugcaacaaccugcc

SEQ ID NO: 36489 - RNA, 23 nt, artificial
  Chemically synthesized
uaagagaagcacuuugggauucu

SEQ ID NO: 36490 - RNA, 23 nt, artificial
  Chemically synthesized
cuaagagaagcacuuugggauuc

SEQ ID NO: 36491 - RNA, 23 nt, artificial
  Chemically synthesized
ucuaagagaagcacuuugggauu

SEQ ID NO: 36492 - RNA, 23 nt, artificial
  Chemically synthesized
uuaaaaaucauugauugucagcu

SEQ ID NO: 36493 - RNA, 23 nt, artificial
  Chemically synthesized
cuuaaaaaucauugauugucagc

SEQ ID NO: 36494 - RNA, 23 nt, artificial
  Chemically synthesized
aaaauauggguugcauuugguca

SEQ ID NO: 36495 - RNA, 23 nt, artificial
  Chemically synthesized
ggaggggaagaugaugagcuacu

SEQ ID NO: 36496 - RNA, 23 nt, artificial
  Chemically synthesized
ugcauaauaagcuaaagaggcug

SEQ ID NO: 36497 - RNA, 23 nt, artificial
  Chemically synthesized
gacaccuauggaauuguccugcu

SEQ ID NO: 36498 - RNA, 23 nt, artificial
  Chemically synthesized
aaggacaccuuuuaacucaccuc

SEQ ID NO: 36499 - RNA, 23 nt, artificial
  Chemically synthesized
aaaggacaccuuuuaacucaccu

SEQ ID NO: 36500 - RNA, 23 nt, artificial
  Chemically synthesized
aaaaggacaccuuuuaacucacc

SEQ ID NO: 36501 - RNA, 23 nt, artificial
  Chemically synthesized
gaaaaggacaccuuuuaacucac

SEQ ID NO: 36502 - RNA, 23 nt, artificial
  Chemically synthesized
auuguccugcuuucuggagugaa

SEQ ID NO: 36503 - RNA, 23 nt, artificial
  Chemically synthesized
ugucuguagcuccucaacucacc

SEQ ID NO: 36504 - RNA, 23 nt, artificial
  Chemically synthesized
augucuguagcuccucaacucac

SEQ ID NO: 36505 - RNA, 23 nt, artificial
  Chemically synthesized
uucaugguucugguugccuuggu

SEQ ID NO: 36506 - RNA, 23 nt, artificial
  Chemically synthesized
uuucaugguucugguugccuugg

SEQ ID NO: 36507 - RNA, 23 nt, artificial
  Chemically synthesized
uuuucaugguucugguugccuug

SEQ ID NO: 36508 - RNA, 23 nt, artificial
  Chemically synthesized
uuuuucaugguucugguugccuu

SEQ ID NO: 36509 - RNA, 23 nt, artificial
  Chemically synthesized
agguccaugccucuggaauggga

SEQ ID NO: 36510 - RNA, 23 nt, artificial
  Chemically synthesized
acugucuuucagauacaugguug

SEQ ID NO: 36511 - RNA, 23 nt, artificial
  Chemically synthesized
aagagagggaaccacagcacagg

SEQ ID NO: 36512 - RNA, 23 nt, artificial
  Chemically synthesized
gaagagagggaaccacagcacag

SEQ ID NO: 36513 - RNA, 23 nt, artificial
  Chemically synthesized
gcaguguucaaucuuaccagugc

SEQ ID NO: 36514 - RNA, 23 nt, artificial
  Chemically synthesized
ggcaguguucaaucuuaccagug

SEQ ID NO: 36515 - RNA, 23 nt, artificial
  Chemically synthesized
acucauuucauuccuaacacagc

SEQ ID NO: 36516 - RNA, 23 nt, artificial
  Chemically synthesized
ccucagccucuacaggacugaga

SEQ ID NO: 36517 - RNA, 23 nt, artificial
  Chemically synthesized
uguuguauucagugagggucuuc

SEQ ID NO: 36518 - RNA, 23 nt, artificial
  Chemically synthesized
auguuguauucagugagggucuu

SEQ ID NO: 36519 - RNA, 23 nt, artificial
  Chemically synthesized
aauguuguauucagugagggucu

SEQ ID NO: 36520 - RNA, 23 nt, artificial
  Chemically synthesized
cucaucuuagugccugagaguau

SEQ ID NO: 36521 - RNA, 23 nt, artificial
  Chemically synthesized
acucaucuuagugccugagagua

SEQ ID NO: 36522 - RNA, 23 nt, artificial
  Chemically synthesized
aucuuuggagaagcaaauaggcc

SEQ ID NO: 36523 - RNA, 23 nt, artificial
  Chemically synthesized
aagcaagagagauguuuugggga

SEQ ID NO: 36524 - RNA, 23 nt, artificial
  Chemically synthesized
cuugacaccucagccucuacagg

SEQ ID NO: 36525 - RNA, 23 nt, artificial
  Chemically synthesized
ccuugacaccucagccucuacag

SEQ ID NO: 36526 - RNA, 23 nt, artificial
  Chemically synthesized
guccuugacaccucagccucuac

SEQ ID NO: 36527 - RNA, 23 nt, artificial
  Chemically synthesized
cguccuugacaccucagccucua

SEQ ID NO: 36528 - RNA, 23 nt, artificial
  Chemically synthesized
guauucagugagggucuucuuac

SEQ ID NO: 36529 - RNA, 23 nt, artificial
  Chemically synthesized
uguauucagugagggucuucuua

SEQ ID NO: 36530 - RNA, 23 nt, artificial
  Chemically synthesized
uaauaaaaaguauauguuaggau

SEQ ID NO: 36531 - RNA, 23 nt, artificial
  Chemically synthesized
guaauaaaaaguauauguuagga

SEQ ID NO: 36532 - RNA, 23 nt, artificial
  Chemically synthesized
agacaccuauggaauuguccugc

SEQ ID NO: 36533 - RNA, 23 nt, artificial
  Chemically synthesized
aagacaccuauggaauuguccug

SEQ ID NO: 36534 - RNA, 23 nt, artificial
  Chemically synthesized
cuuagugccugagaguauuuagg

SEQ ID NO: 36535 - RNA, 23 nt, artificial
  Chemically synthesized
gcaagagagauguuuuggggacu

SEQ ID NO: 36536 - RNA, 23 nt, artificial
  Chemically synthesized
agcaagagagauguuuuggggac

SEQ ID NO: 36537 - RNA, 23 nt, artificial
  Chemically synthesized
agcaucuucacuucuaaaugcau

SEQ ID NO: 36538 - RNA, 23 nt, artificial
  Chemically synthesized
aaaaggagcugaggaaaguggcc

SEQ ID NO: 36539 - RNA, 23 nt, artificial
  Chemically synthesized
aaaaaggagcugaggaaaguggc

SEQ ID NO: 36540 - RNA, 23 nt, artificial
  Chemically synthesized
cuauaagagagauccagcuugcc

SEQ ID NO: 36541 - RNA, 23 nt, artificial
  Chemically synthesized
ucuauaagagagauccagcuugc

SEQ ID NO: 36542 - RNA, 23 nt, artificial
  Chemically synthesized
cucuauaagagagauccagcuug

SEQ ID NO: 36543 - RNA, 23 nt, artificial
  Chemically synthesized
cuucuaaaugcauauccugagcc

SEQ ID NO: 36544 - RNA, 23 nt, artificial
  Chemically synthesized
ugguugccuugguaggauugggc

SEQ ID NO: 36545 - RNA, 23 nt, artificial
  Chemically synthesized
gcuuaucuguuaguuucaccgau

SEQ ID NO: 36546 - RNA, 23 nt, artificial
  Chemically synthesized
gcuuuuucaugcuucucccucuu

SEQ ID NO: 36547 - RNA, 23 nt, artificial
  Chemically synthesized
augauuuuuaagcacuauuagag

SEQ ID NO: 36548 - RNA, 23 nt, artificial
  Chemically synthesized
ugauuuuuaagcacuauuagagu

SEQ ID NO: 36549 - RNA, 23 nt, artificial
  Chemically synthesized
gauuuuuaagcacuauuagaguu

SEQ ID NO: 36550 - RNA, 23 nt, artificial
  Chemically synthesized
auuuuuaagcacuauuagaguug

SEQ ID NO: 36551 - RNA, 23 nt, artificial
  Chemically synthesized
uuuuuaagcacuauuagaguuga

SEQ ID NO: 36552 - RNA, 23 nt, artificial
  Chemically synthesized
ccuuuuccaucccuuaaauccuc

SEQ ID NO: 36553 - RNA, 23 nt, artificial
  Chemically synthesized
cuuuuccaucccuuaaauccuca

SEQ ID NO: 36554 - RNA, 23 nt, artificial
  Chemically synthesized
guucuuccgucauauuccuccau

SEQ ID NO: 36555 - RNA, 23 nt, artificial
  Chemically synthesized
auguuuucauuucacaaaaaugc

SEQ ID NO: 36556 - RNA, 23 nt, artificial
  Chemically synthesized
uguuuucauuucacaaaaaugca

SEQ ID NO: 36557 - RNA, 23 nt, artificial
  Chemically synthesized
uuuucauuucacaaaaaugcaca

SEQ ID NO: 36558 - RNA, 23 nt, artificial
  Chemically synthesized
uuucauuucacaaaaaugcacau

SEQ ID NO: 36559 - RNA, 23 nt, artificial
  Chemically synthesized
gcauuuagaagugaagaugcugc

SEQ ID NO: 36560 - RNA, 23 nt, artificial
  Chemically synthesized
cauuuagaagugaagaugcugcc

SEQ ID NO: 36561 - RNA, 23 nt, artificial
  Chemically synthesized
guuuuacuucuucucaguccugu

SEQ ID NO: 36562 - RNA, 23 nt, artificial
  Chemically synthesized
gagcuuauauaagccgaaaaacg

SEQ ID NO: 36563 - RNA, 23 nt, artificial
  Chemically synthesized
agcuuauauaagccgaaaaacgu

SEQ ID NO: 36564 - RNA, 23 nt, artificial
  Chemically synthesized
gcuuauauaagccgaaaaacguc

SEQ ID NO: 36565 - RNA, 23 nt, artificial
  Chemically synthesized
gcauguaagaagacccucacuga

SEQ ID NO: 36566 - RNA, 23 nt, artificial
  Chemically synthesized
cauguaagaagacccucacugaa

SEQ ID NO: 36567 - RNA, 23 nt, artificial
  Chemically synthesized
auguaagaagacccucacugaau

SEQ ID NO: 36568 - RNA, 23 nt, artificial
  Chemically synthesized
cuguaacaaagaaucauaaugga

SEQ ID NO: 36569 - RNA, 23 nt, artificial
  Chemically synthesized
uguaacaaagaaucauaauggaa

SEQ ID NO: 36570 - RNA, 23 nt, artificial
  Chemically synthesized
guaacaaagaaucauaauggaaa

SEQ ID NO: 36571 - RNA, 23 nt, artificial
  Chemically synthesized
uaacaaagaaucauaauggaaag

SEQ ID NO: 36572 - RNA, 23 nt, artificial
  Chemically synthesized
uuuuaagcacuauuagaguugau

SEQ ID NO: 36573 - RNA, 23 nt, artificial
  Chemically synthesized
uuuaagcacuauuagaguugauu

SEQ ID NO: 36574 - RNA, 23 nt, artificial
  Chemically synthesized
agcuuauuaugcaagccucuagu

SEQ ID NO: 36575 - RNA, 23 nt, artificial
  Chemically synthesized
gcuuauuaugcaagccucuaguc

SEQ ID NO: 36576 - RNA, 23 nt, artificial
  Chemically synthesized
cacugaauacaacauucucggug

SEQ ID NO: 36577 - RNA, 23 nt, artificial
  Chemically synthesized
agguggaagagcugaaacauccc

SEQ ID NO: 36578 - RNA, 23 nt, artificial
  Chemically synthesized
gguggaagagcugaaacaucccc

SEQ ID NO: 36579 - RNA, 23 nt, artificial
  Chemically synthesized
guggaagagcugaaacaucccca

SEQ ID NO: 36580 - RNA, 23 nt, artificial
  Chemically synthesized
uggaagagcugaaacauccccag

SEQ ID NO: 36581 - RNA, 23 nt, artificial
  Chemically synthesized
cucuuagagcuuauauaagccga

SEQ ID NO: 36582 - RNA, 23 nt, artificial
  Chemically synthesized
cuuagagcuuauauaagccgaaa

SEQ ID NO: 36583 - RNA, 23 nt, artificial
  Chemically synthesized
guguuaggaaugaaaugaguccc

SEQ ID NO: 36584 - RNA, 23 nt, artificial
  Chemically synthesized
uguuaggaaugaaaugagucccc

SEQ ID NO: 36585 - RNA, 23 nt, artificial
  Chemically synthesized
guuaggaaugaaaugagucccca

SEQ ID NO: 36586 - RNA, 23 nt, artificial
  Chemically synthesized
uuaggaaugaaaugaguccccaa

SEQ ID NO: 36587 - RNA, 23 nt, artificial
  Chemically synthesized
cauguuuucauuucacaaaaaug

SEQ ID NO: 36588 - RNA, 23 nt, artificial
  Chemically synthesized
cccuucuuauacuucacuccaga

SEQ ID NO: 36589 - RNA, 23 nt, artificial
  Chemically synthesized
ccuucuuauacuucacuccagaa

SEQ ID NO: 36590 - RNA, 23 nt, artificial
  Chemically synthesized
cuucuuauacuucacuccagaaa

SEQ ID NO: 36591 - RNA, 23 nt, artificial
  Chemically synthesized
caaaaucuugaccaaaugcaacc

SEQ ID NO: 36592 - RNA, 23 nt, artificial
  Chemically synthesized
cucuugcuuaucuguuaguuuca

SEQ ID NO: 36593 - RNA, 23 nt, artificial
  Chemically synthesized
ccuguugcugacugcucaagagg

SEQ ID NO: 36594 - RNA, 23 nt, artificial
  Chemically synthesized
cuguugcugacugcucaagagga

SEQ ID NO: 36595 - RNA, 23 nt, artificial
  Chemically synthesized
uguugcugacugcucaagaggag

SEQ ID NO: 36596 - RNA, 23 nt, artificial
  Chemically synthesized
guugcugacugcucaagaggagg

SEQ ID NO: 36597 - RNA, 23 nt, artificial
  Chemically synthesized
uugcugacugcucaagaggaggc

SEQ ID NO: 36598 - RNA, 23 nt, artificial
  Chemically synthesized
cauuucacaaaaaugcacaucua

SEQ ID NO: 36599 - RNA, 23 nt, artificial
  Chemically synthesized
cauguaucugaaagacagucccc

SEQ ID NO: 36600 - RNA, 23 nt, artificial
  Chemically synthesized
auguaucugaaagacaguccccc

SEQ ID NO: 36601 - RNA, 23 nt, artificial
  Chemically synthesized
uguaucugaaagacagucccccu

SEQ ID NO: 36602 - RNA, 23 nt, artificial
  Chemically synthesized
gucauauuccuccauuugucugg

SEQ ID NO: 36603 - RNA, 23 nt, artificial
  Chemically synthesized
cauauuccuccauuugucuggcu

SEQ ID NO: 36604 - RNA, 23 nt, artificial
  Chemically synthesized
gaccuugaguuggacuugccugu

SEQ ID NO: 36605 - RNA, 23 nt, artificial
  Chemically synthesized
accuugaguuggacuugccuguu

SEQ ID NO: 36606 - RNA, 23 nt, artificial
  Chemically synthesized
ccuugaguuggacuugccuguua

SEQ ID NO: 36607 - RNA, 23 nt, artificial
  Chemically synthesized
cuugaguuggacuugccuguuaa

SEQ ID NO: 36608 - RNA, 23 nt, artificial
  Chemically synthesized
gacauuuugaacccuguggucuc

SEQ ID NO: 36609 - RNA, 23 nt, artificial
  Chemically synthesized
acauuuugaacccuguggucuca

SEQ ID NO: 36610 - RNA, 23 nt, artificial
  Chemically synthesized
cauuuugaacccuguggucucaa

SEQ ID NO: 36611 - RNA, 23 nt, artificial
  Chemically synthesized
cuccuucuguagguggaagagcu

SEQ ID NO: 36612 - RNA, 23 nt, artificial
  Chemically synthesized
ccuucuguagguggaagagcuga

SEQ ID NO: 36613 - RNA, 23 nt, artificial
  Chemically synthesized
cuucuguagguggaagagcugaa

SEQ ID NO: 36614 - RNA, 23 nt, artificial
  Chemically synthesized
uaggaaugaaaugaguccccaaa

SEQ ID NO: 36615 - RNA, 23 nt, artificial
  Chemically synthesized
uuuauuacauguuuucauuucac

SEQ ID NO: 36616 - RNA, 23 nt, artificial
  Chemically synthesized
uuauuacauguuuucauuucaca

SEQ ID NO: 36617 - RNA, 23 nt, artificial
  Chemically synthesized
uauuacauguuuucauuucacaa

SEQ ID NO: 36618 - RNA, 23 nt, artificial
  Chemically synthesized
auuacauguuuucauuucacaaa

SEQ ID NO: 36619 - RNA, 23 nt, artificial
  Chemically synthesized
uuacauguuuucauuucacaaaa

SEQ ID NO: 36620 - RNA, 23 nt, artificial
  Chemically synthesized
caguuucauugaucacaaggcca

SEQ ID NO: 36621 - RNA, 23 nt, artificial
  Chemically synthesized
aguuucauugaucacaaggccac

SEQ ID NO: 36622 - RNA, 23 nt, artificial
  Chemically synthesized
cuucuucucaguccuguagaggc

SEQ ID NO: 36623 - RNA, 23 nt, artificial
  Chemically synthesized
cuucucaguccuguagaggcuga

SEQ ID NO: 36624 - RNA, 23 nt, artificial
  Chemically synthesized
uccuaccaaggcaaccagaacca

SEQ ID NO: 36625 - RNA, 23 nt, artificial
  Chemically synthesized
ccuaccaaggcaaccagaaccau

SEQ ID NO: 36626 - RNA, 23 nt, artificial
  Chemically synthesized
gucuucuuacuugaccucaaaug

SEQ ID NO: 36627 - RNA, 23 nt, artificial
  Chemically synthesized
ccuuuucaaucugccuaaauacu

SEQ ID NO: 36628 - RNA, 23 nt, artificial
  Chemically synthesized
gugguucccucucuucuucaggg

SEQ ID NO: 36629 - RNA, 23 nt, artificial
  Chemically synthesized
ugguucccucucuucuucagggg

SEQ ID NO: 36630 - RNA, 23 nt, artificial
  Chemically synthesized
gguucccucucuucuucaggggu

SEQ ID NO: 36631 - RNA, 23 nt, artificial
  Chemically synthesized
guucccucucuucuucaggggug

SEQ ID NO: 36632 - RNA, 23 nt, artificial
  Chemically synthesized
uucccucucuucuucaggggugg

SEQ ID NO: 36633 - RNA, 23 nt, artificial
  Chemically synthesized
cacaauaucuacauucucucuuu

SEQ ID NO: 36634 - RNA, 23 nt, artificial
  Chemically synthesized
acaauaucuacauucucucuuua

SEQ ID NO: 36635 - RNA, 23 nt, artificial
  Chemically synthesized
caauaucuacauucucucuuuag

SEQ ID NO: 36636 - RNA, 23 nt, artificial
  Chemically synthesized
aauaucuacauucucucuuuagu

SEQ ID NO: 36637 - RNA, 23 nt, artificial
  Chemically synthesized
agaugaguguagaacaccuggua

SEQ ID NO: 36638 - RNA, 23 nt, artificial
  Chemically synthesized
uuauuauauuauaggaaaacauc

SEQ ID NO: 36639 - RNA, 23 nt, artificial
  Chemically synthesized
uauuauauuauaggaaaacauca

SEQ ID NO: 36640 - RNA, 23 nt, artificial
  Chemically synthesized
auuauauuauaggaaaacaucau

SEQ ID NO: 36641 - RNA, 23 nt, artificial
  Chemically synthesized
uuauauuauaggaaaacaucauu

SEQ ID NO: 36642 - RNA, 23 nt, artificial
  Chemically synthesized
uauauuauaggaaaacaucauua

SEQ ID NO: 36643 - RNA, 23 nt, artificial
  Chemically synthesized
auauuauaggaaaacaucauuag

SEQ ID NO: 36644 - RNA, 23 nt, artificial
  Chemically synthesized
uauuauaggaaaacaucauuagu

SEQ ID NO: 36645 - RNA, 23 nt, artificial
  Chemically synthesized
auuauaggaaaacaucauuagua

SEQ ID NO: 36646 - RNA, 23 nt, artificial
  Chemically synthesized
uuauaggaaaacaucauuaguag

SEQ ID NO: 36647 - RNA, 23 nt, artificial
  Chemically synthesized
auauuuuccuaauauguacuuca

SEQ ID NO: 36648 - RNA, 23 nt, artificial
  Chemically synthesized
uauuuuccuaauauguacuucac

SEQ ID NO: 36649 - RNA, 23 nt, artificial
  Chemically synthesized
auuuuccuaauauguacuucaca

SEQ ID NO: 36650 - RNA, 23 nt, artificial
  Chemically synthesized
uuuuccuaauauguacuucacaa

SEQ ID NO: 36651 - RNA, 23 nt, artificial
  Chemically synthesized
uuuccuaauauguacuucacaau

SEQ ID NO: 36652 - RNA, 23 nt, artificial
  Chemically synthesized
aauccucaggucacaaccaugua

SEQ ID NO: 36653 - RNA, 23 nt, artificial
  Chemically synthesized
cccuuaaauccucaggucacaac

SEQ ID NO: 36654 - RNA, 23 nt, artificial
  Chemically synthesized
ccgucauauuccuccauuugucu

SEQ ID NO: 36655 - RNA, 23 nt, artificial
  Chemically synthesized
ggccucuuucagccucuuuagcu

SEQ ID NO: 36656 - RNA, 23 nt, artificial
  Chemically synthesized
gccucuuucagccucuuuagcuu

SEQ ID NO: 36657 - RNA, 23 nt, artificial
  Chemically synthesized
ccucuuucagccucuuuagcuua

SEQ ID NO: 36658 - RNA, 23 nt, artificial
  Chemically synthesized
cucuuucagccucuuuagcuuau

SEQ ID NO: 36659 - RNA, 23 nt, artificial
  Chemically synthesized
ucuuucagccucuuuagcuuauu

SEQ ID NO: 36660 - RNA, 23 nt, artificial
  Chemically synthesized
gacauauaaaugaucagcacugg

SEQ ID NO: 36661 - RNA, 23 nt, artificial
  Chemically synthesized
acauauaaaugaucagcacuggu

SEQ ID NO: 36662 - RNA, 23 nt, artificial
  Chemically synthesized
cauauaaaugaucagcacuggua

SEQ ID NO: 36663 - RNA, 23 nt, artificial
  Chemically synthesized
aguguagaacaccugguagcugc

SEQ ID NO: 36664 - RNA, 23 nt, artificial
  Chemically synthesized
guguagaacaccugguagcugcu

SEQ ID NO: 36665 - RNA, 23 nt, artificial
  Chemically synthesized
uguagaacaccugguagcugcuu

SEQ ID NO: 36666 - RNA, 23 nt, artificial
  Chemically synthesized
guagaacaccugguagcugcuuu

SEQ ID NO: 36667 - RNA, 23 nt, artificial
  Chemically synthesized
auacuuagaguuccucauguaga

SEQ ID NO: 36668 - RNA, 23 nt, artificial
  Chemically synthesized
uacuuagaguuccucauguagac

SEQ ID NO: 36669 - RNA, 23 nt, artificial
  Chemically synthesized
gaaucauaauggaaagaauccca

SEQ ID NO: 36670 - RNA, 23 nt, artificial
  Chemically synthesized
cucucuuauagaguuuccauagc

SEQ ID NO: 36671 - RNA, 23 nt, artificial
  Chemically synthesized
cucuuauagaguuuccauagcua

SEQ ID NO: 36672 - RNA, 23 nt, artificial
  Chemically synthesized
cuccaucaucaccagauccuggg

SEQ ID NO: 36673 - RNA, 23 nt, artificial
  Chemically synthesized
uccaucaucaccagauccugggg

SEQ ID NO: 36674 - RNA, 23 nt, artificial
  Chemically synthesized
ccaucaucaccagauccugggga

SEQ ID NO: 36675 - RNA, 23 nt, artificial
  Chemically synthesized
caucaucaccagauccuggggau

SEQ ID NO: 36676 - RNA, 23 nt, artificial
  Chemically synthesized
aucaucaccagauccuggggaua

SEQ ID NO: 36677 - RNA, 23 nt, artificial
  Chemically synthesized
aucaaugauuuuuaagcacuauu

SEQ ID NO: 36678 - RNA, 23 nt, artificial
  Chemically synthesized
ucaaugauuuuuaagcacuauua

SEQ ID NO: 36679 - RNA, 23 nt, artificial
  Chemically synthesized
caaugauuuuuaagcacuauuag

SEQ ID NO: 36680 - RNA, 23 nt, artificial
  Chemically synthesized
aaugauuuuuaagcacuauuaga

SEQ ID NO: 36681 - RNA, 23 nt, artificial
  Chemically synthesized
agaguugauugucaggaagcauu

SEQ ID NO: 36682 - RNA, 23 nt, artificial
  Chemically synthesized
gaguugauugucaggaagcauuc

SEQ ID NO: 36683 - RNA, 23 nt, artificial
  Chemically synthesized
aguugauugucaggaagcauuca

SEQ ID NO: 36684 - RNA, 23 nt, artificial
  Chemically synthesized
guugauugucaggaagcauucaa

SEQ ID NO: 36685 - RNA, 23 nt, artificial
  Chemically synthesized
agucuuccuuuuccaucccuuaa

SEQ ID NO: 36686 - RNA, 23 nt, artificial
  Chemically synthesized
gucuuccuuuuccaucccuuaaa

SEQ ID NO: 36687 - RNA, 23 nt, artificial
  Chemically synthesized
gguaauugaagggcugcugcaug

SEQ ID NO: 36688 - RNA, 23 nt, artificial
  Chemically synthesized
guaauugaagggcugcugcaugg

SEQ ID NO: 36689 - RNA, 23 nt, artificial
  Chemically synthesized
aauugaagggcugcugcauggca

SEQ ID NO: 36690 - RNA, 23 nt, artificial
  Chemically synthesized
auugaagggcugcugcauggcag

SEQ ID NO: 36691 - RNA, 23 nt, artificial
  Chemically synthesized
cuauuagaguugauugucaggaa

SEQ ID NO: 36692 - RNA, 23 nt, artificial
  Chemically synthesized
gaguuaaaagguguccuuuucaa

SEQ ID NO: 36693 - RNA, 23 nt, artificial
  Chemically synthesized
aguuaaaagguguccuuuucaau

SEQ ID NO: 36694 - RNA, 23 nt, artificial
  Chemically synthesized
agcauucaaaaucuugaccaaau

SEQ ID NO: 36695 - RNA, 23 nt, artificial
  Chemically synthesized
gcauucaaaaucuugaccaaaug

SEQ ID NO: 36696 - RNA, 23 nt, artificial
  Chemically synthesized
gcucauaaacauuaggugaguug

SEQ ID NO: 36697 - RNA, 23 nt, artificial
  Chemically synthesized
cucauaaacauuaggugaguuga

SEQ ID NO: 36698 - RNA, 23 nt, artificial
  Chemically synthesized
cauaaacauuaggugaguugagg

SEQ ID NO: 36699 - RNA, 23 nt, artificial
  Chemically synthesized
gcuucuccaaagaugaugcugug

SEQ ID NO: 36700 - RNA, 23 nt, artificial
  Chemically synthesized
cuucuccaaagaugaugcugugu

SEQ ID NO: 36701 - RNA, 23 nt, artificial
  Chemically synthesized
cuuauagaguuuccauagcuaag

SEQ ID NO: 36702 - RNA, 23 nt, artificial
  Chemically synthesized
ucuugaccaaaugcaacccauau

SEQ ID NO: 36703 - RNA, 23 nt, artificial
  Chemically synthesized
cucucaggcacuaagaugagugu

SEQ ID NO: 36704 - RNA, 23 nt, artificial
  Chemically synthesized
ucucaggcacuaagaugagugua

SEQ ID NO: 36705 - RNA, 23 nt, artificial
  Chemically synthesized
cucaggcacuaagaugaguguag

SEQ ID NO: 36706 - RNA, 23 nt, artificial
  Chemically synthesized
gguuggacagggaagaacugugc

SEQ ID NO: 36707 - RNA, 23 nt, artificial
  Chemically synthesized
guuggacagggaagaacugugcc

SEQ ID NO: 36708 - RNA, 23 nt, artificial
  Chemically synthesized
uggacagggaagaacugugccug

SEQ ID NO: 36709 - RNA, 23 nt, artificial
  Chemically synthesized
acaauuccauaggugucuuccca

SEQ ID NO: 36710 - RNA, 23 nt, artificial
  Chemically synthesized
caauuccauaggugucuucccau

SEQ ID NO: 36711 - RNA, 23 nt, artificial
  Chemically synthesized
uuuuuauuacauguuuucauuuc

SEQ ID NO: 36712 - RNA, 23 nt, artificial
  Chemically synthesized
uuuuauuacauguuuucauuuca

SEQ ID NO: 36713 - RNA, 23 nt, artificial
  Chemically synthesized
gccuauuugcuucuccaaagaug

SEQ ID NO: 36714 - RNA, 23 nt, artificial
  Chemically synthesized
ccuauuugcuucuccaaagauga

SEQ ID NO: 36715 - RNA, 23 nt, artificial
  Chemically synthesized
cuauuugcuucuccaaagaugau

SEQ ID NO: 36716 - RNA, 23 nt, artificial
  Chemically synthesized
cuuauacuucacuccagaaagca

SEQ ID NO: 36717 - RNA, 23 nt, artificial
  Chemically synthesized
uaauauguacuucacaauaucua

SEQ ID NO: 36718 - RNA, 23 nt, artificial
  Chemically synthesized
aauauguacuucacaauaucuac

SEQ ID NO: 36719 - RNA, 23 nt, artificial
  Chemically synthesized
auauguacuucacaauaucuaca

SEQ ID NO: 36720 - RNA, 23 nt, artificial
  Chemically synthesized
uauguacuucacaauaucuacau

SEQ ID NO: 36721 - RNA, 23 nt, artificial
  Chemically synthesized
auguacuucacaauaucuacauu

SEQ ID NO: 36722 - RNA, 23 nt, artificial
  Chemically synthesized
acauuaggugaguugaggagcua

SEQ ID NO: 36723 - RNA, 23 nt, artificial
  Chemically synthesized
cauuaggugaguugaggagcuac

SEQ ID NO: 36724 - RNA, 23 nt, artificial
  Chemically synthesized
cuugaccaaaugcaacccauauu

SEQ ID NO: 36725 - RNA, 23 nt, artificial
  Chemically synthesized
ggaccuugaguuggacuugccug

SEQ ID NO: 36726 - RNA, 23 nt, artificial
  Chemically synthesized
uuuguauccuaacauauacuuuu

SEQ ID NO: 36727 - RNA, 23 nt, artificial
  Chemically synthesized
uuguauccuaacauauacuuuuu

SEQ ID NO: 36728 - RNA, 23 nt, artificial
  Chemically synthesized
uguauccuaacauauacuuuuua

SEQ ID NO: 36729 - RNA, 23 nt, artificial
  Chemically synthesized
guauccuaacauauacuuuuuau

SEQ ID NO: 36730 - RNA, 23 nt, artificial
  Chemically synthesized
uauccuaacauauacuuuuuauu

SEQ ID NO: 36731 - RNA, 23 nt, artificial
  Chemically synthesized
ccucuuuagcuuauuaugcaagc

SEQ ID NO: 36732 - RNA, 23 nt, artificial
  Chemically synthesized
cucuuuagcuuauuaugcaagcc

SEQ ID NO: 36733 - RNA, 23 nt, artificial
  Chemically synthesized
cuaauauguacuucacaauaucu

SEQ ID NO: 36734 - RNA, 23 nt, artificial
  Chemically synthesized
cauuaguagcugacaaucaauga

SEQ ID NO: 36735 - RNA, 23 nt, artificial
  Chemically synthesized
aagaaucauaauggaaagaaucc

SEQ ID NO: 36736 - RNA, 23 nt, artificial
  Chemically synthesized
acaaucaaugauuuuuaagcacu

SEQ ID NO: 36737 - RNA, 23 nt, artificial
  Chemically synthesized
caaucaaugauuuuuaagcacua

SEQ ID NO: 36738 - RNA, 23 nt, artificial
  Chemically synthesized
aaucaaugauuuuuaagcacuau

SEQ ID NO: 36739 - RNA, 23 nt, artificial
  Chemically synthesized
ucuacauucucucuuuagucaua

SEQ ID NO: 36740 - RNA, 23 nt, artificial
  Chemically synthesized
cuacauucucucuuuagucauac

SEQ ID NO: 36741 - RNA, 23 nt, artificial
  Chemically synthesized
uacauucucucuuuagucauaca

SEQ ID NO: 36742 - RNA, 23 nt, artificial
  Chemically synthesized
caucauuaguagcugacaaucaa

SEQ ID NO: 36743 - RNA, 23 nt, artificial
  Chemically synthesized
auacuucacuccagaaagcagga

SEQ ID NO: 36744 - RNA, 23 nt, artificial
  Chemically synthesized
acuucacuccagaaagcaggaca

SEQ ID NO: 36745 - RNA, 23 nt, artificial
  Chemically synthesized
cuucacuccagaaagcaggacaa

SEQ ID NO: 36746 - RNA, 23 nt, artificial
  Chemically synthesized
acccuguugcugacugcucaaga

SEQ ID NO: 36747 - RNA, 23 nt, artificial
  Chemically synthesized
cccuguugcugacugcucaagag

SEQ ID NO: 36748 - RNA, 23 nt, artificial
  Chemically synthesized
ugucuucccauuccagaggcaug

SEQ ID NO: 36749 - RNA, 23 nt, artificial
  Chemically synthesized
gucuucccauuccagaggcaugg

SEQ ID NO: 36750 - RNA, 23 nt, artificial
  Chemically synthesized
ucuucccauuccagaggcaugga

SEQ ID NO: 36751 - RNA, 23 nt, artificial
  Chemically synthesized
cuucccauuccagaggcauggac

SEQ ID NO: 36752 - RNA, 23 nt, artificial
  Chemically synthesized
uucccauuccagaggcauggacc

SEQ ID NO: 36753 - RNA, 23 nt, artificial
  Chemically synthesized
gaguuggacuugccuguuaaaug

SEQ ID NO: 36754 - RNA, 23 nt, artificial
  Chemically synthesized
guuggacuugccuguuaaauggg

SEQ ID NO: 36755 - RNA, 23 nt, artificial
  Chemically synthesized
accaaaugcaacccauauuuucc

SEQ ID NO: 36756 - RNA, 23 nt, artificial
  Chemically synthesized
caaaugcaacccauauuuuccua

SEQ ID NO: 36757 - RNA, 23 nt, artificial
  Chemically synthesized
aaugcaacccauauuuuccuaau

SEQ ID NO: 36758 - RNA, 23 nt, artificial
  Chemically synthesized
ugcuucucccucuucacauggca

SEQ ID NO: 36759 - RNA, 23 nt, artificial
  Chemically synthesized
ggggauauggguaauugaagggc

SEQ ID NO: 36760 - RNA, 23 nt, artificial
  Chemically synthesized
acaucucucuugcuuaucuguua

SEQ ID NO: 36761 - RNA, 23 nt, artificial
  Chemically synthesized
aucucucuugcuuaucuguuagu

SEQ ID NO: 36762 - RNA, 23 nt, artificial
  Chemically synthesized
caaaugcauguaagaagacccuc

SEQ ID NO: 36763 - RNA, 23 nt, artificial
  Chemically synthesized
cauauuuuccuaauauguacuuc

SEQ ID NO: 36764 - RNA, 23 nt, artificial
  Chemically synthesized
uuccuaauauguacuucacaaua

SEQ ID NO: 36765 - RNA, 23 nt, artificial
  Chemically synthesized
uccuaauauguacuucacaauau

SEQ ID NO: 36766 - RNA, 23 nt, artificial
  Chemically synthesized
cugguagacucucggaguucugc

SEQ ID NO: 36767 - RNA, 23 nt, artificial
  Chemically synthesized
ugguagacucucggaguucugcc

SEQ ID NO: 36768 - RNA, 23 nt, artificial
  Chemically synthesized
gguagacucucggaguucugcca

SEQ ID NO: 36769 - RNA, 23 nt, artificial
  Chemically synthesized
guagacucucggaguucugccag

SEQ ID NO: 36770 - RNA, 23 nt, artificial
  Chemically synthesized
uagacucucggaguucugccagc

SEQ ID NO: 36771 - RNA, 23 nt, artificial
  Chemically synthesized
gccucuagucuuccuuuuccauc

SEQ ID NO: 36772 - RNA, 23 nt, artificial
  Chemically synthesized
ggacaauuccauaggugucuucc

SEQ ID NO: 36773 - RNA, 23 nt, artificial
  Chemically synthesized
gacaauuccauaggugucuuccc

SEQ ID NO: 36774 - RNA, 23 nt, artificial
  Chemically synthesized
aguauacuuuggaauauacaaag

SEQ ID NO: 36775 - RNA, 23 nt, artificial
  Chemically synthesized
guauacuuuggaauauacaaagu

SEQ ID NO: 36776 - RNA, 23 nt, artificial
  Chemically synthesized
uauacuuuggaauauacaaagua

SEQ ID NO: 36777 - RNA, 23 nt, artificial
  Chemically synthesized
auacuuuggaauauacaaaguac

SEQ ID NO: 36778 - RNA, 23 nt, artificial
  Chemically synthesized
uacuuuggaauauacaaaguaca

SEQ ID NO: 36779 - RNA, 23 nt, artificial
  Chemically synthesized
guccuuuucaaucugccuaaaua

SEQ ID NO: 36780 - RNA, 23 nt, artificial
  Chemically synthesized
aaaauugaccagagagagcucag

SEQ ID NO: 36781 - RNA, 23 nt, artificial
  Chemically synthesized
aaauugaccagagagagcucaga

SEQ ID NO: 36782 - RNA, 23 nt, artificial
  Chemically synthesized
aauugaccagagagagcucagau

SEQ ID NO: 36783 - RNA, 23 nt, artificial
  Chemically synthesized
cugguaagauugaacacugcccc

SEQ ID NO: 36784 - RNA, 23 nt, artificial
  Chemically synthesized
ugguaagauugaacacugccccc

SEQ ID NO: 36785 - RNA, 23 nt, artificial
  Chemically synthesized
gguaagauugaacacugccccca

SEQ ID NO: 36786 - RNA, 23 nt, artificial
  Chemically synthesized
guaagauugaacacugcccccag

SEQ ID NO: 36787 - RNA, 23 nt, artificial
  Chemically synthesized
acuuuggaauauacaaaguacag

SEQ ID NO: 36788 - RNA, 23 nt, artificial
  Chemically synthesized
cuuuggaauauacaaaguacagc

SEQ ID NO: 36789 - RNA, 23 nt, artificial
  Chemically synthesized
gaguuuccauagcuaagggaaac

SEQ ID NO: 36790 - RNA, 23 nt, artificial
  Chemically synthesized
aguuuccauagcuaagggaaaca

SEQ ID NO: 36791 - RNA, 23 nt, artificial
  Chemically synthesized
guuuccauagcuaagggaaacac

SEQ ID NO: 36792 - RNA, 23 nt, artificial
  Chemically synthesized
uacauguuuucauuucacaaaaa

SEQ ID NO: 36793 - RNA, 23 nt, artificial
  Chemically synthesized
gcccaguuucauugaucacaagg

SEQ ID NO: 36794 - RNA, 23 nt, artificial
  Chemically synthesized
cccaguuucauugaucacaaggc

SEQ ID NO: 36795 - RNA, 23 nt, artificial
  Chemically synthesized
accuugagaggugaguuaaaagg

SEQ ID NO: 36796 - RNA, 23 nt, artificial
  Chemically synthesized
ccuugagaggugaguuaaaaggu

SEQ ID NO: 36797 - RNA, 23 nt, artificial
  Chemically synthesized
cuugagaggugaguuaaaaggug

SEQ ID NO: 36798 - RNA, 23 nt, artificial
  Chemically synthesized
ugagaggugaguuaaaagguguc

SEQ ID NO: 36799 - RNA, 23 nt, artificial
  Chemically synthesized
auaaaugaucagcacugguaaga

SEQ ID NO: 36800 - RNA, 23 nt, artificial
  Chemically synthesized
gucaggaagcauucaaaaucuug

SEQ ID NO: 36801 - RNA, 23 nt, artificial
  Chemically synthesized
caccuugagaggugaguuaaaag

SEQ ID NO: 36802 - RNA, 23 nt, artificial
  Chemically synthesized
acuucacaauaucuacauucucu

SEQ ID NO: 36803 - RNA, 23 nt, artificial
  Chemically synthesized
cccauauuuuccuaauauguacu

SEQ ID NO: 36804 - RNA, 23 nt, artificial
  Chemically synthesized
ccauauuuuccuaauauguacuu

SEQ ID NO: 36805 - RNA, 23 nt, artificial
  Chemically synthesized
ccccuccaucaucaccagauccu

SEQ ID NO: 36806 - RNA, 23 nt, artificial
  Chemically synthesized
cccuccaucaucaccagauccug

SEQ ID NO: 36807 - RNA, 23 nt, artificial
  Chemically synthesized
ccuccaucaucaccagauccugg

SEQ ID NO: 36808 - RNA, 23 nt, artificial
  Chemically synthesized
cacuuuccucagcuccuuuuuuu

SEQ ID NO: 36809 - RNA, 23 nt, artificial
  Chemically synthesized
agaguucuauguucuuccgucau

SEQ ID NO: 36810 - RNA, 23 nt, artificial
  Chemically synthesized
gaguucuauguucuuccgucaua

SEQ ID NO: 36811 - RNA, 23 nt, artificial
  Chemically synthesized
aucugccuaaauacucucaggca

SEQ ID NO: 36812 - RNA, 23 nt, artificial
  Chemically synthesized
guacuucacaauaucuacauucu

SEQ ID NO: 36813 - RNA, 23 nt, artificial
  Chemically synthesized
augaucagcacugguaagauuga

SEQ ID NO: 36814 - RNA, 23 nt, artificial
  Chemically synthesized
ugaucagcacugguaagauugaa

SEQ ID NO: 36815 - RNA, 23 nt, artificial
  Chemically synthesized
gaucagcacugguaagauugaac

SEQ ID NO: 36816 - RNA, 23 nt, artificial
  Chemically synthesized
uagaguuuccauagcuaagggaa

SEQ ID NO: 36817 - RNA, 23 nt, artificial
  Chemically synthesized
cacccuucuuauacuucacucca

SEQ ID NO: 36818 - RNA, 23 nt, artificial
  Chemically synthesized
gugcuucucuuagagcuuauaua

SEQ ID NO: 36819 - RNA, 23 nt, artificial
  Chemically synthesized
ugcuucucuuagagcuuauauaa

SEQ ID NO: 36820 - RNA, 23 nt, artificial
  Chemically synthesized
gcuucucuuagagcuuauauaag

SEQ ID NO: 36821 - RNA, 23 nt, artificial
  Chemically synthesized
ggcauggaccuugaguuggacuu

SEQ ID NO: 36822 - RNA, 23 nt, artificial
  Chemically synthesized
gcauggaccuugaguuggacuug

SEQ ID NO: 36823 - RNA, 23 nt, artificial
  Chemically synthesized
acguugacauauaaaugaucagc

SEQ ID NO: 36824 - RNA, 23 nt, artificial
  Chemically synthesized
cguugacauauaaaugaucagca

SEQ ID NO: 36825 - RNA, 23 nt, artificial
  Chemically synthesized
guugacauauaaaugaucagcac

SEQ ID NO: 36826 - RNA, 23 nt, artificial
  Chemically synthesized
cugugguucccucucuucuucag

SEQ ID NO: 36827 - RNA, 23 nt, artificial
  Chemically synthesized
cagauacguugacauauaaauga

SEQ ID NO: 36828 - RNA, 23 nt, artificial
  Chemically synthesized
agauacguugacauauaaaugau

SEQ ID NO: 36829 - RNA, 23 nt, artificial
  Chemically synthesized
auacguugacauauaaaugauca

SEQ ID NO: 36830 - RNA, 23 nt, artificial
  Chemically synthesized
guucuauguucuuccgucauauu

SEQ ID NO: 36831 - RNA, 23 nt, artificial
  Chemically synthesized
gguucaugucuucuuacuugacc

SEQ ID NO: 36832 - RNA, 23 nt, artificial
  Chemically synthesized
ccacuugguucaugucuucuuac

SEQ ID NO: 36833 - RNA, 23 nt, artificial
  Chemically synthesized
cacuugguucaugucuucuuacu

SEQ ID NO: 36834 - RNA, 23 nt, artificial
  Chemically synthesized
ugaguuggacuugccuguuaaau

SEQ ID NO: 36835 - RNA, 23 nt, artificial
  Chemically synthesized
ccauaggugucuucccauuccag

SEQ ID NO: 36836 - RNA, 23 nt, artificial
  Chemically synthesized
cauaggugucuucccauuccaga

SEQ ID NO: 36837 - RNA, 23 nt, artificial
  Chemically synthesized
ggaauauacaaaguacagcccag

SEQ ID NO: 36838 - RNA, 23 nt, artificial
  Chemically synthesized
gaauauacaaaguacagcccagu

SEQ ID NO: 36839 - RNA, 23 nt, artificial
  Chemically synthesized
aauauacaaaguacagcccaguu

SEQ ID NO: 36840 - RNA, 23 nt, artificial
  Chemically synthesized
gcccagaguucuauguucuuccg

SEQ ID NO: 36841 - RNA, 23 nt, artificial
  Chemically synthesized
cccagaguucuauguucuuccgu

SEQ ID NO: 36842 - RNA, 23 nt, artificial
  Chemically synthesized
gcacuauuagaguugauugucag

SEQ ID NO: 36843 - RNA, 23 nt, artificial
  Chemically synthesized
cacuauuagaguugauugucagg

SEQ ID NO: 36844 - RNA, 23 nt, artificial
  Chemically synthesized
acccuguggucucaagguccacu

SEQ ID NO: 36845 - RNA, 23 nt, artificial
  Chemically synthesized
cccuguggucucaagguccacuu

SEQ ID NO: 36846 - RNA, 23 nt, artificial
  Chemically synthesized
ccuguggucucaagguccacuug

SEQ ID NO: 36847 - RNA, 23 nt, artificial
  Chemically synthesized
cuguggucucaagguccacuugg

SEQ ID NO: 36848 - RNA, 23 nt, artificial
  Chemically synthesized
uguggucucaagguccacuuggu

SEQ ID NO: 36849 - RNA, 23 nt, artificial
  Chemically synthesized
ccagaaccaugaaaaacaucaca

SEQ ID NO: 36850 - RNA, 23 nt, artificial
  Chemically synthesized
cagaaccaugaaaaacaucacaa

SEQ ID NO: 36851 - RNA, 23 nt, artificial
  Chemically synthesized
ccccuacaauugcacuggaaaua

SEQ ID NO: 36852 - RNA, 23 nt, artificial
  Chemically synthesized
cccuacaauugcacuggaaauac

SEQ ID NO: 36853 - RNA, 23 nt, artificial
  Chemically synthesized
ccuacaauugcacuggaaauaca

SEQ ID NO: 36854 - RNA, 23 nt, artificial
  Chemically synthesized
cuacaauugcacuggaaauacac

SEQ ID NO: 36855 - RNA, 23 nt, artificial
  Chemically synthesized
ccaucccuuaaauccucagguca

SEQ ID NO: 36856 - RNA, 23 nt, artificial
  Chemically synthesized
caucccuuaaauccucaggucac

SEQ ID NO: 36857 - RNA, 23 nt, artificial
  Chemically synthesized
aucccuuaaauccucaggucaca

SEQ ID NO: 36858 - RNA, 23 nt, artificial
  Chemically synthesized
ggucucaagguccacuugguuca

SEQ ID NO: 36859 - RNA, 23 nt, artificial
  Chemically synthesized
gucucaagguccacuugguucau

SEQ ID NO: 36860 - RNA, 23 nt, artificial
  Chemically synthesized
cucaagguccacuugguucaugu

SEQ ID NO: 36861 - RNA, 23 nt, artificial
  Chemically synthesized
gggauacuuagaguuccucaugu

SEQ ID NO: 36862 - RNA, 23 nt, artificial
  Chemically synthesized
ggauacuuagaguuccucaugua

SEQ ID NO: 36863 - RNA, 23 nt, artificial
  Chemically synthesized
gauacuuagaguuccucauguag

SEQ ID NO: 36864 - RNA, 23 nt, artificial
  Chemically synthesized
cugccuaaauacucucaggcacu

SEQ ID NO: 36865 - RNA, 23 nt, artificial
  Chemically synthesized
ugccuaaauacucucaggcacua

SEQ ID NO: 36866 - RNA, 23 nt, artificial
  Chemically synthesized
agaguuccucauguagaccuugu

SEQ ID NO: 36867 - RNA, 23 nt, artificial
  Chemically synthesized
gaguuccucauguagaccuugug

SEQ ID NO: 36868 - RNA, 23 nt, artificial
  Chemically synthesized
guuccucauguagaccuuguggc

SEQ ID NO: 36869 - RNA, 23 nt, artificial
  Chemically synthesized
aggcacuaagaugaguguagaac

SEQ ID NO: 36870 - RNA, 23 nt, artificial
  Chemically synthesized
ggcacuaagaugaguguagaaca

SEQ ID NO: 36871 - RNA, 23 nt, artificial
  Chemically synthesized
gcacuaagaugaguguagaacac

SEQ ID NO: 36872 - RNA, 23 nt, artificial
  Chemically synthesized
cacuaagaugaguguagaacacc

SEQ ID NO: 36873 - RNA, 23 nt, artificial
  Chemically synthesized
ugucuucuuacuugaccucaaau

SEQ ID NO: 36874 - RNA, 23 nt, artificial
  Chemically synthesized
aggcauggaccuugaguuggacu

SEQ ID NO: 36875 - RNA, 23 nt, artificial
  Chemically synthesized
gagauuccucaaaauugaccaga

SEQ ID NO: 36876 - RNA, 23 nt, artificial
  Chemically synthesized
gauuccucaaaauugaccagaga

SEQ ID NO: 36877 - RNA, 23 nt, artificial
  Chemically synthesized
auuccucaaaauugaccagagag

SEQ ID NO: 36878 - RNA, 23 nt, artificial
  Chemically synthesized
uuccucaaaauugaccagagaga

SEQ ID NO: 36879 - RNA, 23 nt, artificial
  Chemically synthesized
ugaauacaacauucucggugccu

SEQ ID NO: 36880 - RNA, 23 nt, artificial
  Chemically synthesized
gaauacaacauucucggugccug

SEQ ID NO: 36881 - RNA, 23 nt, artificial
  Chemically synthesized
auacaacauucucggugccugua

SEQ ID NO: 36882 - RNA, 23 nt, artificial
  Chemically synthesized
uacaacauucucggugccuguaa

SEQ ID NO: 36883 - RNA, 23 nt, artificial
  Chemically synthesized
caccugguagcugcuuuuucaug

SEQ ID NO: 36884 - RNA, 23 nt, artificial
  Chemically synthesized
ccugguagcugcuuuuucaugcu

SEQ ID NO: 36885 - RNA, 23 nt, artificial
  Chemically synthesized
cugguagcugcuuuuucaugcuu

SEQ ID NO: 36886 - RNA, 23 nt, artificial
  Chemically synthesized
gcuucucccucuucacauggcag

SEQ ID NO: 36887 - RNA, 23 nt, artificial
  Chemically synthesized
cuucucccucuucacauggcagc

SEQ ID NO: 36888 - RNA, 23 nt, artificial
  Chemically synthesized
gugcugugguucccucucuucuu

SEQ ID NO: 36889 - RNA, 23 nt, artificial
  Chemically synthesized
ggucacaaccauguaucugaaag

SEQ ID NO: 36890 - RNA, 23 nt, artificial
  Chemically synthesized
gucacaaccauguaucugaaaga

SEQ ID NO: 36891 - RNA, 23 nt, artificial
  Chemically synthesized
cacaaccauguaucugaaagaca

SEQ ID NO: 36892 - RNA, 23 nt, artificial
  Chemically synthesized
acgucugagauuccucaaaauug

SEQ ID NO: 36893 - RNA, 23 nt, artificial
  Chemically synthesized
cgucugagauuccucaaaauuga

SEQ ID NO: 36894 - RNA, 23 nt, artificial
  Chemically synthesized
gucugagauuccucaaaauugac

SEQ ID NO: 36895 - RNA, 23 nt, artificial
  Chemically synthesized
cugagauuccucaaaauugacca

SEQ ID NO: 36896 - RNA, 23 nt, artificial
  Chemically synthesized
uacguugacauauaaaugaucag

SEQ ID NO: 36897 - RNA, 23 nt, artificial
  Chemically synthesized
gaucucucuuauagaguuuccau

SEQ ID NO: 36898 - RNA, 23 nt, artificial
  Chemically synthesized
aagguguccuuuucaaucugccu

SEQ ID NO: 36899 - RNA, 23 nt, artificial
  Chemically synthesized
agguguccuuuucaaucugccua

SEQ ID NO: 36900 - RNA, 23 nt, artificial
  Chemically synthesized
gguguccuuuucaaucugccuaa

SEQ ID NO: 36901 - RNA, 23 nt, artificial
  Chemically synthesized
guguccuuuucaaucugccuaaa

SEQ ID NO: 36902 - RNA, 23 nt, artificial
  Chemically synthesized
ggggauacuuagaguuccucaug

SEQ ID NO: 36903 - RNA, 23 nt, artificial
  Chemically synthesized
aagcuggaucucucuuauagagu

SEQ ID NO: 36904 - RNA, 23 nt, artificial
  Chemically synthesized
agcuggaucucucuuauagaguu

SEQ ID NO: 36905 - RNA, 23 nt, artificial
  Chemically synthesized
gcuggaucucucuuauagaguuu

SEQ ID NO: 36906 - RNA, 23 nt, artificial
  Chemically synthesized
cuggaucucucuuauagaguuuc

SEQ ID NO: 36907 - RNA, 23 nt, artificial
  Chemically synthesized
agccucuagucuuccuuuuccau

SEQ ID NO: 36908 - RNA, 23 nt, artificial
  Chemically synthesized
ggccuccuuugaccaggccuucu

SEQ ID NO: 36909 - RNA, 23 nt, artificial
  Chemically synthesized
gccuccuuugaccaggccuucug

SEQ ID NO: 36910 - RNA, 23 nt, artificial
  Chemically synthesized
ccuccuuugaccaggccuucugg

SEQ ID NO: 36911 - RNA, 23 nt, artificial
  Chemically synthesized
cuccuuugaccaggccuucuggg

SEQ ID NO: 36912 - RNA, 23 nt, artificial
  Chemically synthesized
uccuuugaccaggccuucugggc

SEQ ID NO: 36913 - RNA, 23 nt, artificial
  Chemically synthesized
gaaguauacuuuggaauauacaa

SEQ ID NO: 36914 - RNA, 23 nt, artificial
  Chemically synthesized
aaguauacuuuggaauauacaaa

SEQ ID NO: 36915 - RNA, 23 nt, artificial
  Chemically synthesized
cagguuguugcaagauugacccc

SEQ ID NO: 36916 - RNA, 23 nt, artificial
  Chemically synthesized
agguuguugcaagauugaccccg

SEQ ID NO: 36917 - RNA, 23 nt, artificial
  Chemically synthesized
gguuguugcaagauugaccccgg

SEQ ID NO: 36918 - RNA, 23 nt, artificial
  Chemically synthesized
guuguugcaagauugaccccgga

SEQ ID NO: 36919 - RNA, 23 nt, artificial
  Chemically synthesized
acaauugcacuggaaauacacau

SEQ ID NO: 36920 - RNA, 23 nt, artificial
  Chemically synthesized
caauugcacuggaaauacacaug

SEQ ID NO: 36921 - RNA, 23 nt, artificial
  Chemically synthesized
aacgucugagauuccucaaaauu

SEQ ID NO: 36922 - RNA, 23 nt, artificial
  Chemically synthesized
cacuccagaaagcaggacaauuc

SEQ ID NO: 36923 - RNA, 23 nt, artificial
  Chemically synthesized
cuccagaaagcaggacaauucca

SEQ ID NO: 36924 - RNA, 23 nt, artificial
  Chemically synthesized
uauacuuuuuauuacauguuuuc

SEQ ID NO: 36925 - RNA, 23 nt, artificial
  Chemically synthesized
auacuuuuuauuacauguuuuca

SEQ ID NO: 36926 - RNA, 23 nt, artificial
  Chemically synthesized
uacuuuuuauuacauguuuucau

SEQ ID NO: 36927 - RNA, 23 nt, artificial
  Chemically synthesized
acuuuuuauuacauguuuucauu

SEQ ID NO: 36928 - RNA, 23 nt, artificial
  Chemically synthesized
cuuuuuauuacauguuuucauuu

SEQ ID NO: 36929 - RNA, 23 nt, artificial
  Chemically synthesized
cccauuccagaggcauggaccuu

SEQ ID NO: 36930 - RNA, 23 nt, artificial
  Chemically synthesized
ccauuccagaggcauggaccuug

SEQ ID NO: 36931 - RNA, 23 nt, artificial
  Chemically synthesized
cauuccagaggcauggaccuuga

SEQ ID NO: 36932 - RNA, 23 nt, artificial
  Chemically synthesized
caugaaaaacaucacaaggagac

SEQ ID NO: 36933 - RNA, 23 nt, artificial
  Chemically synthesized
augaaaaacaucacaaggagaca

SEQ ID NO: 36934 - RNA, 23 nt, artificial
  Chemically synthesized
gaaaaacaucacaaggagacaca

SEQ ID NO: 36935 - RNA, 23 nt, artificial
  Chemically synthesized
ggaucucucuuauagaguuucca

SEQ ID NO: 36936 - RNA, 23 nt, artificial
  Chemically synthesized
acccucacugaauacaacauucu

SEQ ID NO: 36937 - RNA, 23 nt, artificial
  Chemically synthesized
cccucacugaauacaacauucuc

SEQ ID NO: 36938 - RNA, 23 nt, artificial
  Chemically synthesized
ggaaaacaucauuaguagcugac

SEQ ID NO: 36939 - RNA, 23 nt, artificial
  Chemically synthesized
gaaaacaucauuaguagcugaca

SEQ ID NO: 36940 - RNA, 23 nt, artificial
  Chemically synthesized
aaacaucauuaguagcugacaau

SEQ ID NO: 36941 - RNA, 23 nt, artificial
  Chemically synthesized
aggauaugcauuuagaagugaag

SEQ ID NO: 36942 - RNA, 23 nt, artificial
  Chemically synthesized
ggauaugcauuuagaagugaaga

SEQ ID NO: 36943 - RNA, 23 nt, artificial
  Chemically synthesized
gauaugcauuuagaagugaagau

SEQ ID NO: 36944 - RNA, 23 nt, artificial
  Chemically synthesized
caugucuucuuacuugaccucaa

SEQ ID NO: 36945 - RNA, 23 nt, artificial
  Chemically synthesized
augucuucuuacuugaccucaaa

SEQ ID NO: 36946 - RNA, 23 nt, artificial
  Chemically synthesized
cacaaaaaugcacaucuacauaa

SEQ ID NO: 36947 - RNA, 23 nt, artificial
  Chemically synthesized
acaaaaaugcacaucuacauaaa

SEQ ID NO: 36948 - RNA, 23 nt, artificial
  Chemically synthesized
aaagaaucauaauggaaagaauc

SEQ ID NO: 36949 - RNA, 23 nt, artificial
  Chemically synthesized
ccgaaaaacgucugagauuccuc

SEQ ID NO: 36950 - RNA, 23 nt, artificial
  Chemically synthesized
cgaaaaacgucugagauuccuca

SEQ ID NO: 36951 - RNA, 23 nt, artificial
  Chemically synthesized
gaaaaacgucugagauuccucaa

SEQ ID NO: 36952 - RNA, 23 nt, artificial
  Chemically synthesized
aaaaacgucugagauuccucaaa

SEQ ID NO: 36953 - RNA, 23 nt, artificial
  Chemically synthesized
aaccaugaaaaacaucacaagga

SEQ ID NO: 36954 - RNA, 23 nt, artificial
  Chemically synthesized
accaugaaaaacaucacaaggag

SEQ ID NO: 36955 - RNA, 23 nt, artificial
  Chemically synthesized
ccaugaaaaacaucacaaggaga

SEQ ID NO: 36956 - RNA, 23 nt, artificial
  Chemically synthesized
cugcuguccacccaguagaucug

SEQ ID NO: 36957 - RNA, 23 nt, artificial
  Chemically synthesized
ugcuguccacccaguagaucugg

SEQ ID NO: 36958 - RNA, 23 nt, artificial
  Chemically synthesized
gcuguccacccaguagaucuggg

SEQ ID NO: 36959 - RNA, 23 nt, artificial
  Chemically synthesized
cuguccacccaguagaucugggg

SEQ ID NO: 36960 - RNA, 23 nt, artificial
  Chemically synthesized
uguccacccaguagaucugggga

SEQ ID NO: 36961 - RNA, 23 nt, artificial
  Chemically synthesized
cagagagagcucagauacguuga

SEQ ID NO: 36962 - RNA, 23 nt, artificial
  Chemically synthesized
agagagagcucagauacguugac

SEQ ID NO: 36963 - RNA, 23 nt, artificial
  Chemically synthesized
gagagagcucagauacguugaca

SEQ ID NO: 36964 - RNA, 23 nt, artificial
  Chemically synthesized
agagagcucagauacguugacau

SEQ ID NO: 36965 - RNA, 23 nt, artificial
  Chemically synthesized
aggugucuucccauuccagaggc

SEQ ID NO: 36966 - RNA, 23 nt, artificial
  Chemically synthesized
ggugucuucccauuccagaggca

SEQ ID NO: 36967 - RNA, 23 nt, artificial
  Chemically synthesized
gugucuucccauuccagaggcau

SEQ ID NO: 36968 - RNA, 23 nt, artificial
  Chemically synthesized
aaaguacagcccaguuucauuga

SEQ ID NO: 36969 - RNA, 23 nt, artificial
  Chemically synthesized
guacagcccaguuucauugauca

SEQ ID NO: 36970 - RNA, 23 nt, artificial
  Chemically synthesized
cuuucagccucuuuagcuuauua

SEQ ID NO: 36971 - RNA, 23 nt, artificial
  Chemically synthesized
uuucagccucuuuagcuuauuau

SEQ ID NO: 36972 - RNA, 23 nt, artificial
  Chemically synthesized
ucaggucacaaccauguaucuga

SEQ ID NO: 36973 - RNA, 23 nt, artificial
  Chemically synthesized
caggucacaaccauguaucugaa

SEQ ID NO: 36974 - RNA, 23 nt, artificial
  Chemically synthesized
aggucacaaccauguaucugaaa

SEQ ID NO: 36975 - RNA, 23 nt, artificial
  Chemically synthesized
ggguaauugaagggcugcugcau

SEQ ID NO: 36976 - RNA, 23 nt, artificial
  Chemically synthesized
agaaagcaggacaauuccauagg

SEQ ID NO: 36977 - RNA, 23 nt, artificial
  Chemically synthesized
aagcaggacaauuccauaggugu

SEQ ID NO: 36978 - RNA, 23 nt, artificial
  Chemically synthesized
uagagcuuauauaagccgaaaaa

SEQ ID NO: 36979 - RNA, 23 nt, artificial
  Chemically synthesized
ugaguguagaacaccugguagcu

SEQ ID NO: 36980 - RNA, 23 nt, artificial
  Chemically synthesized
aagguccacuugguucaugucuu

SEQ ID NO: 36981 - RNA, 23 nt, artificial
  Chemically synthesized
agguccacuugguucaugucuuc

SEQ ID NO: 36982 - RNA, 23 nt, artificial
  Chemically synthesized
gguccacuugguucaugucuucu

SEQ ID NO: 36983 - RNA, 23 nt, artificial
  Chemically synthesized
guccacuugguucaugucuucuu

SEQ ID NO: 36984 - RNA, 23 nt, artificial
  Chemically synthesized
cauaauggaaagaaucccaaagu

SEQ ID NO: 36985 - RNA, 23 nt, artificial
  Chemically synthesized
gaccucaaaugcauguaagaaga

SEQ ID NO: 36986 - RNA, 23 nt, artificial
  Chemically synthesized
accucaaaugcauguaagaagac

SEQ ID NO: 36987 - RNA, 23 nt, artificial
  Chemically synthesized
ccucaaaugcauguaagaagacc

SEQ ID NO: 36988 - RNA, 23 nt, artificial
  Chemically synthesized
cuugaccucaaaugcauguaaga

SEQ ID NO: 36989 - RNA, 23 nt, artificial
  Chemically synthesized
gcuacagacauuuugaacccugu

SEQ ID NO: 36990 - RNA, 23 nt, artificial
  Chemically synthesized
cuacagacauuuugaacccugug

SEQ ID NO: 36991 - RNA, 23 nt, artificial
  Chemically synthesized
acagacauuuugaacccuguggu

SEQ ID NO: 36992 - RNA, 23 nt, artificial
  Chemically synthesized
gguagcugcuuuuucaugcuucu

SEQ ID NO: 36993 - RNA, 23 nt, artificial
  Chemically synthesized
guagcugcuuuuucaugcuucuc

SEQ ID NO: 36994 - RNA, 23 nt, artificial
  Chemically synthesized
aguagcugacaaucaaugauuuu

SEQ ID NO: 36995 - RNA, 23 nt, artificial
  Chemically synthesized
guagcugacaaucaaugauuuuu

SEQ ID NO: 36996 - RNA, 23 nt, artificial
  Chemically synthesized
uagcugacaaucaaugauuuuua

SEQ ID NO: 36997 - RNA, 23 nt, artificial
  Chemically synthesized
cucaaaauugaccagagagagcu

SEQ ID NO: 36998 - RNA, 23 nt, artificial
  Chemically synthesized
caaaauugaccagagagagcuca

SEQ ID NO: 36999 - RNA, 23 nt, artificial
  Chemically synthesized
gccucuuuagcuuauuaugcaag

SEQ ID NO: 37000 - RNA, 23 nt, artificial
  Chemically synthesized
ggaaagaaucccaaagugcuucu

SEQ ID NO: 37001 - RNA, 23 nt, artificial
  Chemically synthesized
ggaagcauucaaaaucuugacca

SEQ ID NO: 37002 - RNA, 23 nt, artificial
  Chemically synthesized
gaagcauucaaaaucuugaccaa

SEQ ID NO: 37003 - RNA, 23 nt, artificial
  Chemically synthesized
ggacuugccuguuaaaugggcca

SEQ ID NO: 37004 - RNA, 23 nt, artificial
  Chemically synthesized
gacuugccuguuaaaugggccac

SEQ ID NO: 37005 - RNA, 23 nt, artificial
  Chemically synthesized
acuugccuguuaaaugggccacu

SEQ ID NO: 37006 - RNA, 23 nt, artificial
  Chemically synthesized
gccacccuucuuauacuucacuc

SEQ ID NO: 37007 - RNA, 23 nt, artificial
  Chemically synthesized
gccccagcaaacgguuuuacuuc

SEQ ID NO: 37008 - RNA, 23 nt, artificial
  Chemically synthesized
ccccagcaaacgguuuuacuucu

SEQ ID NO: 37009 - RNA, 23 nt, artificial
  Chemically synthesized
agaguuuccauagcuaagggaaa

SEQ ID NO: 37010 - RNA, 23 nt, artificial
  Chemically synthesized
cccaaagugcuucucuuagagcu

SEQ ID NO: 37011 - RNA, 23 nt, artificial
  Chemically synthesized
ccaaagugcuucucuuagagcuu

SEQ ID NO: 37012 - RNA, 23 nt, artificial
  Chemically synthesized
caaagugcuucucuuagagcuua

SEQ ID NO: 37013 - RNA, 23 nt, artificial
  Chemically synthesized
aaagugcuucucuuagagcuuau

SEQ ID NO: 37014 - RNA, 23 nt, artificial
  Chemically synthesized
aagugcuucucuuagagcuuaua

SEQ ID NO: 37015 - RNA, 23 nt, artificial
  Chemically synthesized
aacauucucggugccuguaacaa

SEQ ID NO: 37016 - RNA, 23 nt, artificial
  Chemically synthesized
acauucucggugccuguaacaaa

SEQ ID NO: 37017 - RNA, 23 nt, artificial
  Chemically synthesized
uucucggugccuguaacaaagaa

SEQ ID NO: 37018 - RNA, 23 nt, artificial
  Chemically synthesized
ugaguugaggagcuacagacauu

SEQ ID NO: 37019 - RNA, 23 nt, artificial
  Chemically synthesized
gaguugaggagcuacagacauuu

SEQ ID NO: 37020 - RNA, 23 nt, artificial
  Chemically synthesized
aguugaggagcuacagacauuuu

SEQ ID NO: 37021 - RNA, 23 nt, artificial
  Chemically synthesized
guugaggagcuacagacauuuug

SEQ ID NO: 37022 - RNA, 23 nt, artificial
  Chemically synthesized
aauggaaagaaucccaaagugcu

SEQ ID NO: 37023 - RNA, 23 nt, artificial
  Chemically synthesized
guggucucaagguccacuugguu

SEQ ID NO: 37024 - RNA, 23 nt, artificial
  Chemically synthesized
ggcaaccagaaccaugaaaaaca

SEQ ID NO: 37025 - RNA, 23 nt, artificial
  Chemically synthesized
gcaaccagaaccaugaaaaacau

SEQ ID NO: 37026 - RNA, 23 nt, artificial
  Chemically synthesized
caaccagaaccaugaaaaacauc

SEQ ID NO: 37027 - RNA, 23 nt, artificial
  Chemically synthesized
gauugucaggaagcauucaaaau

SEQ ID NO: 37028 - RNA, 23 nt, artificial
  Chemically synthesized
ccucagcuccuuuuuuucagggg

SEQ ID NO: 37029 - RNA, 23 nt, artificial
  Chemically synthesized
cucagcuccuuuuuuucaggggg

SEQ ID NO: 37030 - RNA, 23 nt, artificial
  Chemically synthesized
ucagcuccuuuuuuucagggggu

SEQ ID NO: 37031 - RNA, 23 nt, artificial
  Chemically synthesized
gugcaguagcucaucaucuuccc

SEQ ID NO: 37032 - RNA, 23 nt, artificial
  Chemically synthesized
ugcaguagcucaucaucuucccc

SEQ ID NO: 37033 - RNA, 23 nt, artificial
  Chemically synthesized
gcaguagcucaucaucuuccccu

SEQ ID NO: 37034 - RNA, 23 nt, artificial
  Chemically synthesized
caguagcucaucaucuuccccuc

SEQ ID NO: 37035 - RNA, 23 nt, artificial
  Chemically synthesized
cuguagguggaagagcugaaaca

SEQ ID NO: 37036 - RNA, 23 nt, artificial
  Chemically synthesized
uguagguggaagagcugaaacau

SEQ ID NO: 37037 - RNA, 23 nt, artificial
  Chemically synthesized
ccccaaaacaucucucuugcuua

SEQ ID NO: 37038 - RNA, 23 nt, artificial
  Chemically synthesized
cccaaaacaucucucuugcuuau

SEQ ID NO: 37039 - RNA, 23 nt, artificial
  Chemically synthesized
ccaaaacaucucucuugcuuauc

SEQ ID NO: 37040 - RNA, 23 nt, artificial
  Chemically synthesized
gaggagcuacagacauuuugaac

SEQ ID NO: 37041 - RNA, 23 nt, artificial
  Chemically synthesized
ugacaaucaaugauuuuuaagca

SEQ ID NO: 37042 - RNA, 23 nt, artificial
  Chemically synthesized
ugcugacugcucaagaggaggca

SEQ ID NO: 37043 - RNA, 23 nt, artificial
  Chemically synthesized
guaucugaaagacagucccccuu

SEQ ID NO: 37044 - RNA, 23 nt, artificial
  Chemically synthesized
cuguuaguuucaccgauggcuca

SEQ ID NO: 37045 - RNA, 23 nt, artificial
  Chemically synthesized
agccucuuuagcuuauuaugcaa

SEQ ID NO: 37046 - RNA, 23 nt, artificial
  Chemically synthesized
uccucaaaauugaccagagagag

SEQ ID NO: 37047 - RNA, 23 nt, artificial
  Chemically synthesized
ccucaaaauugaccagagagagc

SEQ ID NO: 37048 - RNA, 23 nt, artificial
  Chemically synthesized
ccaguagugcaguagcucaucau

SEQ ID NO: 37049 - RNA, 23 nt, artificial
  Chemically synthesized
caguagugcaguagcucaucauc

SEQ ID NO: 37050 - RNA, 23 nt, artificial
  Chemically synthesized
guagugcaguagcucaucaucuu

SEQ ID NO: 37051 - RNA, 23 nt, artificial
  Chemically synthesized
acagcccaguuucauugaucaca

SEQ ID NO: 37052 - RNA, 23 nt, artificial
  Chemically synthesized
cagcccaguuucauugaucacaa

SEQ ID NO: 37053 - RNA, 23 nt, artificial
  Chemically synthesized
uggcugguagacucucggaguuc

SEQ ID NO: 37054 - RNA, 23 nt, artificial
  Chemically synthesized
ggcugguagacucucggaguucu

SEQ ID NO: 37055 - RNA, 23 nt, artificial
  Chemically synthesized
gcugguagacucucggaguucug

SEQ ID NO: 37056 - RNA, 23 nt, artificial
  Chemically synthesized
gaacaccugguagcugcuuuuuc

SEQ ID NO: 37057 - RNA, 23 nt, artificial
  Chemically synthesized
acaccugguagcugcuuuuucau

SEQ ID NO: 37058 - RNA, 23 nt, artificial
  Chemically synthesized
ccucaggucacaaccauguaucu

SEQ ID NO: 37059 - RNA, 23 nt, artificial
  Chemically synthesized
cucaggucacaaccauguaucug

SEQ ID NO: 37060 - RNA, 23 nt, artificial
  Chemically synthesized
auggaaagaaucccaaagugcuu

SEQ ID NO: 37061 - RNA, 23 nt, artificial
  Chemically synthesized
acauguuuucauuucacaaaaau

SEQ ID NO: 37062 - RNA, 23 nt, artificial
  Chemically synthesized
cagcuccuucuguagguggaaga

SEQ ID NO: 37063 - RNA, 23 nt, artificial
  Chemically synthesized
agcuccuucuguagguggaagag

SEQ ID NO: 37064 - RNA, 23 nt, artificial
  Chemically synthesized
gcuccuucuguagguggaagagc

SEQ ID NO: 37065 - RNA, 23 nt, artificial
  Chemically synthesized
gcucaggauaugcauuuagaagu

SEQ ID NO: 37066 - RNA, 23 nt, artificial
  Chemically synthesized
caggauaugcauuuagaagugaa

SEQ ID NO: 37067 - RNA, 23 nt, artificial
  Chemically synthesized
ggccacccuucuuauacuucacu

SEQ ID NO: 37068 - RNA, 23 nt, artificial
  Chemically synthesized
cuggcucauaaacauuaggugag

SEQ ID NO: 37069 - RNA, 23 nt, artificial
  Chemically synthesized
uggcucauaaacauuaggugagu

SEQ ID NO: 37070 - RNA, 23 nt, artificial
  Chemically synthesized
ggcucauaaacauuaggugaguu

SEQ ID NO: 37071 - RNA, 23 nt, artificial
  Chemically synthesized
acauucucucuuuagucauacac

SEQ ID NO: 37072 - RNA, 23 nt, artificial
  Chemically synthesized
cccaauccuaccaaggcaaccag

SEQ ID NO: 37073 - RNA, 23 nt, artificial
  Chemically synthesized
ccaauccuaccaaggcaaccaga

SEQ ID NO: 37074 - RNA, 23 nt, artificial
  Chemically synthesized
caauccuaccaaggcaaccagaa

SEQ ID NO: 37075 - RNA, 23 nt, artificial
  Chemically synthesized
aauccuaccaaggcaaccagaac

SEQ ID NO: 37076 - RNA, 23 nt, artificial
  Chemically synthesized
ggcagguuguugcaagauugacc

SEQ ID NO: 37077 - RNA, 23 nt, artificial
  Chemically synthesized
agaaucccaaagugcuucucuua

SEQ ID NO: 37078 - RNA, 23 nt, artificial
  Chemically synthesized
gaaucccaaagugcuucucuuag

SEQ ID NO: 37079 - RNA, 23 nt, artificial
  Chemically synthesized
aaucccaaagugcuucucuuaga

SEQ ID NO: 37080 - RNA, 23 nt, artificial
  Chemically synthesized
agcugacaaucaaugauuuuuaa

SEQ ID NO: 37081 - RNA, 23 nt, artificial
  Chemically synthesized
gcugacaaucaaugauuuuuaag

SEQ ID NO: 37082 - RNA, 23 nt, artificial
  Chemically synthesized
ugaccaaaugcaacccauauuuu

SEQ ID NO: 37083 - RNA, 23 nt, artificial
  Chemically synthesized
aguagcucaucaucuuccccucc

SEQ ID NO: 37084 - RNA, 23 nt, artificial
  Chemically synthesized
cagccucuuuagcuuauuaugca

SEQ ID NO: 37085 - RNA, 23 nt, artificial
  Chemically synthesized
agcaggacaauuccauagguguc

SEQ ID NO: 37086 - RNA, 23 nt, artificial
  Chemically synthesized
gaggugaguuaaaagguguccuu

SEQ ID NO: 37087 - RNA, 23 nt, artificial
  Chemically synthesized
aggugaguuaaaagguguccuuu

SEQ ID NO: 37088 - RNA, 23 nt, artificial
  Chemically synthesized
ggugaguuaaaagguguccuuuu

SEQ ID NO: 37089 - RNA, 23 nt, artificial
  Chemically synthesized
gugaguuaaaagguguccuuuuc

SEQ ID NO: 37090 - RNA, 23 nt, artificial
  Chemically synthesized
uucacuccagaaagcaggacaau

SEQ ID NO: 37091 - RNA, 23 nt, artificial
  Chemically synthesized
ggugaguugaggagcuacagaca

SEQ ID NO: 37092 - RNA, 23 nt, artificial
  Chemically synthesized
gugaguugaggagcuacagacau

SEQ ID NO: 37093 - RNA, 23 nt, artificial
  Chemically synthesized
accaaggcaaccagaaccaugaa

SEQ ID NO: 37094 - RNA, 23 nt, artificial
  Chemically synthesized
ccaaggcaaccagaaccaugaaa

SEQ ID NO: 37095 - RNA, 23 nt, artificial
  Chemically synthesized
caaggcaaccagaaccaugaaaa

SEQ ID NO: 37096 - RNA, 23 nt, artificial
  Chemically synthesized
aaggcaaccagaaccaugaaaaa

SEQ ID NO: 37097 - RNA, 23 nt, artificial
  Chemically synthesized
ucccauuccagaggcauggaccu

SEQ ID NO: 37098 - RNA, 23 nt, artificial
  Chemically synthesized
caaccauguaucugaaagacagu

SEQ ID NO: 37099 - RNA, 23 nt, artificial
  Chemically synthesized
ccugugcugugguucccucucuu

SEQ ID NO: 37100 - RNA, 23 nt, artificial
  Chemically synthesized
cugugcugugguucccucucuuc

SEQ ID NO: 37101 - RNA, 23 nt, artificial
  Chemically synthesized
gcacugguaagauugaacacugc

SEQ ID NO: 37102 - RNA, 23 nt, artificial
  Chemically synthesized
cacugguaagauugaacacugcc

SEQ ID NO: 37103 - RNA, 23 nt, artificial
  Chemically synthesized
gcuguguuaggaaugaaaugagu

SEQ ID NO: 37104 - RNA, 23 nt, artificial
  Chemically synthesized
ucucaguccuguagaggcugagg

SEQ ID NO: 37105 - RNA, 23 nt, artificial
  Chemically synthesized
gaagacccucacugaauacaaca

SEQ ID NO: 37106 - RNA, 23 nt, artificial
  Chemically synthesized
aagacccucacugaauacaacau

SEQ ID NO: 37107 - RNA, 23 nt, artificial
  Chemically synthesized
agacccucacugaauacaacauu

SEQ ID NO: 37108 - RNA, 23 nt, artificial
  Chemically synthesized
auacucucaggcacuaagaugag

SEQ ID NO: 37109 - RNA, 23 nt, artificial
  Chemically synthesized
uacucucaggcacuaagaugagu

SEQ ID NO: 37110 - RNA, 23 nt, artificial
  Chemically synthesized
ggccuauuugcuucuccaaagau

SEQ ID NO: 37111 - RNA, 23 nt, artificial
  Chemically synthesized
uccccaaaacaucucucuugcuu

SEQ ID NO: 37112 - RNA, 23 nt, artificial
  Chemically synthesized
ccuguagaggcugaggugucaag

SEQ ID NO: 37113 - RNA, 23 nt, artificial
  Chemically synthesized
cuguagaggcugaggugucaagg

SEQ ID NO: 37114 - RNA, 23 nt, artificial
  Chemically synthesized
guagaggcugaggugucaaggac

SEQ ID NO: 37115 - RNA, 23 nt, artificial
  Chemically synthesized
uagaggcugaggugucaaggacg

SEQ ID NO: 37116 - RNA, 23 nt, artificial
  Chemically synthesized
guaagaagacccucacugaauac

SEQ ID NO: 37117 - RNA, 23 nt, artificial
  Chemically synthesized
uaagaagacccucacugaauaca

SEQ ID NO: 37118 - RNA, 23 nt, artificial
  Chemically synthesized
auccuaacauauacuuuuuauua

SEQ ID NO: 37119 - RNA, 23 nt, artificial
  Chemically synthesized
uccuaacauauacuuuuuauuac

SEQ ID NO: 37120 - RNA, 23 nt, artificial
  Chemically synthesized
gcaggacaauuccauaggugucu

SEQ ID NO: 37121 - RNA, 23 nt, artificial
  Chemically synthesized
caggacaauuccauaggugucuu

SEQ ID NO: 37122 - RNA, 23 nt, artificial
  Chemically synthesized
ccuaaauacucucaggcacuaag

SEQ ID NO: 37123 - RNA, 23 nt, artificial
  Chemically synthesized
aguccccaaaacaucucucuugc

SEQ ID NO: 37124 - RNA, 23 nt, artificial
  Chemically synthesized
guccccaaaacaucucucuugcu

SEQ ID NO: 37125 - RNA, 23 nt, artificial
  Chemically synthesized
augcauuuagaagugaagaugcu

SEQ ID NO: 37126 - RNA, 23 nt, artificial
  Chemically synthesized
ggccacuuuccucagcuccuuuu

SEQ ID NO: 37127 - RNA, 23 nt, artificial
  Chemically synthesized
gccacuuuccucagcuccuuuuu

SEQ ID NO: 37128 - RNA, 23 nt, artificial
  Chemically synthesized
ggcaagcuggaucucucuuauag

SEQ ID NO: 37129 - RNA, 23 nt, artificial
  Chemically synthesized
gcaagcuggaucucucuuauaga

SEQ ID NO: 37130 - RNA, 23 nt, artificial
  Chemically synthesized
caagcuggaucucucuuauagag

SEQ ID NO: 37131 - RNA, 23 nt, artificial
  Chemically synthesized
ggcucaggauaugcauuuagaag

SEQ ID NO: 37132 - RNA, 23 nt, Artificial
  Chemically synthesized
gcccaauccuaccaaggcaacca

SEQ ID NO: 37133 - RNA, 19 nt, artificial
  Chemically synthesized
ggaggaagucggugaagaa

SEQ ID NO: 37134 - RNA, 19 nt, artificial
  Chemically synthesized
cguggaggaugauggagaa

SEQ ID NO: 37135 - RNA, 19 nt, artificial
  Chemically synthesized
ggagagguuuuaauuaaaa

SEQ ID NO: 37136 - RNA, 19 nt, artificial
  Chemically synthesized
gcucgaaacugacuggaaa

SEQ ID NO: 37137 - RNA, 19 nt, artificial
  Chemically synthesized
aggagagguuuuaauuaaa

SEQ ID NO: 37138 - RNA, 19 nt, artificial
  Chemically synthesized
aggaggagcugccuuaaaa

SEQ ID NO: 37139 - RNA, 19 nt, artificial
  Chemically synthesized
ggaauauucucuauuuuaa

SEQ ID NO: 37140 - RNA, 19 nt, artificial
  Chemically synthesized
agcaguaauuaaagaaaaa

SEQ ID NO: 37141 - RNA, 19 nt, artificial
  Chemically synthesized
agaagucaguagaauaaaa

SEQ ID NO: 37142 - RNA, 19 nt, artificial
  Chemically synthesized
gggaguaaacaauagucua

SEQ ID NO: 37143 - RNA, 19 nt, artificial
  Chemically synthesized
cuucaauuucuguauaaaa

SEQ ID NO: 37144 - RNA, 19 nt, artificial
  Chemically synthesized
cacccuagauuuguauaaa

SEQ ID NO: 37145 - RNA, 19 nt, artificial
  Chemically synthesized
cugccuuaaaaaaaaauaa

SEQ ID NO: 37146 - RNA, 19 nt, artificial
  Chemically synthesized
ccuucaauuucuguauaaa

SEQ ID NO: 37147 - RNA, 19 nt, artificial
  Chemically synthesized
cuuccuuaaagacauuuaa

SEQ ID NO: 37148 - RNA, 19 nt, artificial
  Chemically synthesized
ugguaagcuuuaucauaua

SEQ ID NO: 37149 - RNA, 19 nt, artificial
  Chemically synthesized
aaggagagguuuuaauuaa

SEQ ID NO: 37150 - RNA, 19 nt, artificial
  Chemically synthesized
gcagcgaaaucaacgagaa

SEQ ID NO: 37151 - RNA, 19 nt, artificial
  Chemically synthesized
uguuuuuguugaaaacaaa

SEQ ID NO: 37152 - RNA, 19 nt, artificial
  Chemically synthesized
gagguuuuaauuaaaacaa

SEQ ID NO: 37153 - RNA, 19 nt, artificial
  Chemically synthesized
gagaugauccuaaaaauaa

SEQ ID NO: 37154 - RNA, 19 nt, artificial
  Chemically synthesized
caguagaauaaaaucuuaa

SEQ ID NO: 37155 - RNA, 19 nt, artificial
  Chemically synthesized
uagcaguaauuaaagaaaa

SEQ ID NO: 37156 - RNA, 19 nt, artificial
  Chemically synthesized
caauuuuaccuucuuuaaa

SEQ ID NO: 37157 - RNA, 19 nt, artificial
  Chemically synthesized
agaaacuggacuuuuuaaa

SEQ ID NO: 37158 - RNA, 19 nt, artificial
  Chemically synthesized
ccaauuuuaccuucuuuaa

SEQ ID NO: 37159 - RNA, 19 nt, artificial
  Chemically synthesized
cuguuguauuaacauuuaa

SEQ ID NO: 37160 - RNA, 19 nt, artificial
  Chemically synthesized
gcaguaauuaaagaaaaaa

SEQ ID NO: 37161 - RNA, 19 nt, artificial
  Chemically synthesized
aagcggagcucgaaacuga

SEQ ID NO: 37162 - RNA, 19 nt, artificial
  Chemically synthesized
aaucuuaaagcacucauaa

SEQ ID NO: 37163 - RNA, 19 nt, artificial
  Chemically synthesized
agauacuucuguaacuuaa

SEQ ID NO: 37164 - RNA, 19 nt, artificial
  Chemically synthesized
aaacggugcugcugggaaa

SEQ ID NO: 37165 - RNA, 19 nt, artificial
  Chemically synthesized
cuuuguuguuuuuguugaa

SEQ ID NO: 37166 - RNA, 19 nt, artificial
  Chemically synthesized
ccuuugggcugccuuauau

SEQ ID NO: 37167 - RNA, 19 nt, artificial
  Chemically synthesized
aaaagcagaucuuuuuaaa

SEQ ID NO: 37168 - RNA, 19 nt, artificial
  Chemically synthesized
aaaucuuaaagcacucaua

SEQ ID NO: 37169 - RNA, 19 nt, artificial
  Chemically synthesized
aaagcagaucuuuuuaaaa

SEQ ID NO: 37170 - RNA, 19 nt, artificial
  Chemically synthesized
uguuggagcuuuccucaaa

SEQ ID NO: 37171 - RNA, 19 nt, artificial
  Chemically synthesized
uaaagacauuuaagcuaaa

SEQ ID NO: 37172 - RNA, 19 nt, artificial
  Chemically synthesized
agaugauccuaaaaauaac

SEQ ID NO: 37173 - RNA, 19 nt, artificial
  Chemically synthesized
ccuguuguauuaacauuua

SEQ ID NO: 37174 - RNA, 19 nt, artificial
  Chemically synthesized
gcagaucuuuuuaaaaaga

SEQ ID NO: 37175 - RNA, 19 nt, artificial
  Chemically synthesized
ucagaacaccagcaguuaa

SEQ ID NO: 37176 - RNA, 19 nt, artificial
  Chemically synthesized
agagguuuuaauuaaaaca

SEQ ID NO: 37177 - RNA, 19 nt, artificial
  Chemically synthesized
acccuagauuuguauaaau

SEQ ID NO: 37178 - RNA, 19 nt, artificial
  Chemically synthesized
ucaguagaauaaaaucuua

SEQ ID NO: 37179 - RNA, 19 nt, artificial
  Chemically synthesized
ggagaaucgugugaucagu

SEQ ID NO: 37180 - RNA, 19 nt, artificial
  Chemically synthesized
ucacugcagucuuaagaaa

SEQ ID NO: 37181 - RNA, 19 nt, artificial
  Chemically synthesized
aagcagaucuuuuuaaaaa

SEQ ID NO: 37182 - RNA, 19 nt, artificial
  Chemically synthesized
ccucaggcuuugcgauuua

SEQ ID NO: 37183 - RNA, 19 nt, artificial
  Chemically synthesized
gcugccuuaaaaaaaaaua

SEQ ID NO: 37184 - RNA, 19 nt, artificial
  Chemically synthesized
caauaaauauacauugcau

SEQ ID NO: 37185 - RNA, 19 nt, artificial
  Chemically synthesized
acuucuguaacuuaagaaa

SEQ ID NO: 37186 - RNA, 19 nt, artificial
  Chemically synthesized
acauugcauuaaaaagaaa

SEQ ID NO: 37187 - RNA, 19 nt, artificial
  Chemically synthesized
cauauuuugucuuuaggua

SEQ ID NO: 37188 - RNA, 19 nt, artificial
  Chemically synthesized
cugacagaccuuaaucuua

SEQ ID NO: 37189 - RNA, 19 nt, artificial
  Chemically synthesized
cuuguucacugcagucuua

SEQ ID NO: 37190 - RNA, 19 nt, artificial
  Chemically synthesized
ucuucuucuucuuccuuaa

SEQ ID NO: 37191 - RNA, 19 nt, artificial
  Chemically synthesized
aaaaauaaccgaagaaaga

SEQ ID NO: 37192 - RNA, 19 nt, artificial
  Chemically synthesized
caauuucuguauaaaagca

SEQ ID NO: 37193 - RNA, 19 nt, artificial
  Chemically synthesized
gagagguuuuaauuaaaac

SEQ ID NO: 37194 - RNA, 19 nt, artificial
  Chemically synthesized
uacauugcauuaaaaagaa

SEQ ID NO: 37195 - RNA, 19 nt, artificial
  Chemically synthesized
aggaauauucucuauuuua

SEQ ID NO: 37196 - RNA, 19 nt, artificial
  Chemically synthesized
agaccuuaaucuuaauuac

SEQ ID NO: 37197 - RNA, 19 nt, artificial
  Chemically synthesized
caacgaguuugaccaguac

SEQ ID NO: 37198 - RNA, 19 nt, artificial
  Chemically synthesized
cagaccuuaaucuuaauua

SEQ ID NO: 37199 - RNA, 19 nt, artificial
  Chemically synthesized
gaagucaguagaauaaaau

SEQ ID NO: 37200 - RNA, 19 nt, artificial
  Chemically synthesized
uaaggagagguuuuaauua

SEQ ID NO: 37201 - RNA, 19 nt, artificial
  Chemically synthesized
gaggaauauucucuauuuu

SEQ ID NO: 37202 - RNA, 19 nt, artificial
  Chemically synthesized
guaaggagagguuuuaauu

SEQ ID NO: 37203 - RNA, 19 nt, artificial
  Chemically synthesized
gguaagcuuuaucauauau

SEQ ID NO: 37204 - RNA, 19 nt, artificial
  Chemically synthesized
cuuaaagcacucauaauau

SEQ ID NO: 37205 - RNA, 19 nt, artificial
  Chemically synthesized
gcaagcaaaggagaugaaa

SEQ ID NO: 37206 - RNA, 19 nt, artificial
  Chemically synthesized
agaauaaaaucuuaaagca

SEQ ID NO: 37207 - RNA, 19 nt, artificial
  Chemically synthesized
guuuggacuuuguaauuau

SEQ ID NO: 37208 - RNA, 19 nt, artificial
  Chemically synthesized
caccagcaguuaaccuuca

SEQ ID NO: 37209 - RNA, 19 nt, artificial
  Chemically synthesized
gggauuuauacauauuuuu

SEQ ID NO: 37210 - RNA, 19 nt, artificial
  Chemically synthesized
cuaaaaauaaccgaagaaa

SEQ ID NO: 37211 - RNA, 19 nt, artificial
  Chemically synthesized
uauuuugucuuuagguaaa

SEQ ID NO: 37212 - RNA, 19 nt, artificial
  Chemically synthesized
acuuguuucuuuuuuugua

SEQ ID NO: 37213 - RNA, 19 nt, artificial
  Chemically synthesized
caguaauuaaagaaaaaag

SEQ ID NO: 37214 - RNA, 19 nt, artificial
  Chemically synthesized
uccuucaauuucuguauaa

SEQ ID NO: 37215 - RNA, 19 nt, artificial
  Chemically synthesized
ucuuaaagcacucauaaua

SEQ ID NO: 37216 - RNA, 19 nt, artificial
  Chemically synthesized
cuagagaagcauuugguaa

SEQ ID NO: 37217 - RNA, 19 nt, artificial
  Chemically synthesized
ggaggaugauggagaaucg

SEQ ID NO: 37218 - RNA, 19 nt, artificial
  Chemically synthesized
gaccuauccaagcgcauua

SEQ ID NO: 37219 - RNA, 19 nt, artificial
  Chemically synthesized
ggucaucuguuguuaaauu

SEQ ID NO: 37220 - RNA, 19 nt, artificial
  Chemically synthesized
guaagcuuuaucauauaua

SEQ ID NO: 37221 - RNA, 19 nt, artificial
  Chemically synthesized
aaacauuugcacucuuuua

SEQ ID NO: 37222 - RNA, 19 nt, artificial
  Chemically synthesized
gaaacuuguuucuuuuuuu

SEQ ID NO: 37223 - RNA, 19 nt, artificial
  Chemically synthesized
gauugcaaauguaguguau

SEQ ID NO: 37224 - RNA, 19 nt, artificial
  Chemically synthesized
ucuuaagaaagagguaaaa

SEQ ID NO: 37225 - RNA, 19 nt, artificial
  Chemically synthesized
uaaacaauagucuagagaa

SEQ ID NO: 37226 - RNA, 19 nt, artificial
  Chemically synthesized
uagaagucaguagaauaaa

SEQ ID NO: 37227 - RNA, 19 nt, artificial
  Chemically synthesized
uauuuuuccaacagcuaaa

SEQ ID NO: 37228 - RNA, 19 nt, artificial
  Chemically synthesized
gggaaacauuugcacucuu

SEQ ID NO: 37229 - RNA, 19 nt, artificial
  Chemically synthesized
cacuugcuaaaauuauuua

SEQ ID NO: 37230 - RNA, 19 nt, artificial
  Chemically synthesized
caguuaaccuucaagacau

SEQ ID NO: 37231 - RNA, 19 nt, artificial
  Chemically synthesized
aaagcaaguuucuuuguau

SEQ ID NO: 37232 - RNA, 19 nt, artificial
  Chemically synthesized
cagaucuuuuuaaaaagau

SEQ ID NO: 37233 - RNA, 19 nt, artificial
  Chemically synthesized
agaguauuuuuguacagau

SEQ ID NO: 37234 - RNA, 19 nt, artificial
  Chemically synthesized
uaaacuacucuuaguugaa

SEQ ID NO: 37235 - RNA, 19 nt, artificial
  Chemically synthesized
gaccuuugggcugccuuau

SEQ ID NO: 37236 - RNA, 19 nt, artificial
  Chemically synthesized
uccacuugcuaaaauuauu

SEQ ID NO: 37237 - RNA, 19 nt, artificial
  Chemically synthesized
uguccaucccuuuuuucuu

SEQ ID NO: 37238 - RNA, 19 nt, artificial
  Chemically synthesized
gaccuuaaucuuaauuacu

SEQ ID NO: 37239 - RNA, 19 nt, artificial
  Chemically synthesized
uuugguaagcuuuaucaua

SEQ ID NO: 37240 - RNA, 19 nt, artificial
  Chemically synthesized
aucuuaaagcacucauaau

SEQ ID NO: 37241 - RNA, 19 nt, artificial
  Chemically synthesized
uuguuuuuguugaaaacaa

SEQ ID NO: 37242 - RNA, 19 nt, artificial
  Chemically synthesized
gaguauuuuuguacagauu

SEQ ID NO: 37243 - RNA, 19 nt, artificial
  Chemically synthesized
uuagcaguaauuaaagaaa

SEQ ID NO: 37244 - RNA, 19 nt, artificial
  Chemically synthesized
gcaauuaugggaguaaaca

SEQ ID NO: 37245 - RNA, 19 nt, artificial
  Chemically synthesized
gcaacucguacccaaauuu

SEQ ID NO: 37246 - RNA, 19 nt, artificial
  Chemically synthesized
uuagaagucaguagaauaa

SEQ ID NO: 37247 - RNA, 19 nt, artificial
  Chemically synthesized
ugaaaucuguucugggaau

SEQ ID NO: 37248 - RNA, 19 nt, artificial
  Chemically synthesized
ugaggaauauucucuauuu

SEQ ID NO: 37249 - RNA, 19 nt, artificial
  Chemically synthesized
guuguuaaauuauguucuu

SEQ ID NO: 37250 - RNA, 19 nt, artificial
  Chemically synthesized
guucguguuuuguuuguuu

SEQ ID NO: 37251 - RNA, 19 nt, artificial
  Chemically synthesized
uauaaaugagagauugcaa

SEQ ID NO: 37252 - RNA, 19 nt, artificial
  Chemically synthesized
auacuucuguaacuuaaga

SEQ ID NO: 37253 - RNA, 19 nt, artificial
  Chemically synthesized
uuuaaagaagagaaaaaca

SEQ ID NO: 37254 - RNA, 19 nt, artificial
  Chemically synthesized
aauuauguucuuaacugua

SEQ ID NO: 37255 - RNA, 19 nt, artificial
  Chemically synthesized
auauuuugucuuuagguaa

SEQ ID NO: 37256 - RNA, 19 nt, artificial
  Chemically synthesized
uuaaaaagauacuucugua

SEQ ID NO: 37257 - RNA, 19 nt, artificial
  Chemically synthesized
ccacuugcuaaaauuauuu

SEQ ID NO: 37258 - RNA, 19 nt, artificial
  Chemically synthesized
gcauuuaaaucauauuuug

SEQ ID NO: 37259 - RNA, 19 nt, artificial
  Chemically synthesized
auuauguucuuaacuguaa

SEQ ID NO: 37260 - RNA, 19 nt, artificial
  Chemically synthesized
gucaucuguuguuaaauua

SEQ ID NO: 37261 - RNA, 19 nt, artificial
  Chemically synthesized
ugugccucucagaacacca

SEQ ID NO: 37262 - RNA, 19 nt, artificial
  Chemically synthesized
ggacuuuguaauuauuuuu

SEQ ID NO: 37263 - RNA, 19 nt, artificial
  Chemically synthesized
gucaguagaauaaaaucuu

SEQ ID NO: 37264 - RNA, 19 nt, artificial
  Chemically synthesized
agcagaucuuuuuaaaaag

SEQ ID NO: 37265 - RNA, 19 nt, artificial
  Chemically synthesized
ccacccggauuacaaguac

SEQ ID NO: 37266 - RNA, 19 nt, artificial
  Chemically synthesized
aacggcuccagcaagaaca

SEQ ID NO: 37267 - RNA, 19 nt, artificial
  Chemically synthesized
acagauuugcuuucucuua

SEQ ID NO: 37268 - RNA, 19 nt, artificial
  Chemically synthesized
guauggucaucuguuguua

SEQ ID NO: 37269 - RNA, 19 nt, artificial
  Chemically synthesized
cccuuuuuucuuuguuguu

SEQ ID NO: 37270 - RNA, 19 nt, artificial
  Chemically synthesized
guauaaaagcagaucuuuu

SEQ ID NO: 37271 - RNA, 19 nt, artificial
  Chemically synthesized
gaacagugugcccuagcuu

SEQ ID NO: 37272 - RNA, 19 nt, artificial
  Chemically synthesized
uggacuuuguaauuauuuu

SEQ ID NO: 37273 - RNA, 19 nt, artificial
  Chemically synthesized
agcauuugguaagcuuuau

SEQ ID NO: 37274 - RNA, 19 nt, artificial
  Chemically synthesized
aauuaugggaguaaacaau

SEQ ID NO: 37275 - RNA, 19 nt, artificial
  Chemically synthesized
auuuugucuuuagguaaaa

SEQ ID NO: 37276 - RNA, 19 nt, artificial
  Chemically synthesized
gaaacugacuggaaacuuc

SEQ ID NO: 37277 - RNA, 19 nt, artificial
  Chemically synthesized
gagaggaccaaccagaauu

SEQ ID NO: 37278 - RNA, 19 nt, artificial
  Chemically synthesized
auaaaugagagauugcaaa

SEQ ID NO: 37279 - RNA, 19 nt, artificial
  Chemically synthesized
uaaaaagauacuucuguaa

SEQ ID NO: 37280 - RNA, 19 nt, artificial
  Chemically synthesized
agaguuugaggauugcuuu

SEQ ID NO: 37281 - RNA, 19 nt, artificial
  Chemically synthesized
acccggauuacaaguacca

SEQ ID NO: 37282 - RNA, 19 nt, artificial
  Chemically synthesized
gccuuaaaaaaaaauaaag

SEQ ID NO: 37283 - RNA, 19 nt, artificial
  Chemically synthesized
cuuguuucuuuuuuuguau

SEQ ID NO: 37284 - RNA, 19 nt, artificial
  Chemically synthesized
caacgagaaacuggacuuu

SEQ ID NO: 37285 - RNA, 19 nt, artificial
  Chemically synthesized
uugguaagcuuuaucauau

SEQ ID NO: 37286 - RNA, 19 nt, artificial
  Chemically synthesized
aaaagauacuucuguaacu

SEQ ID NO: 37287 - RNA, 19 nt, artificial
  Chemically synthesized
gauggagaaucgugugauc

SEQ ID NO: 37288 - RNA, 19 nt, artificial
  Chemically synthesized
aaauuauguucuuaacugu

SEQ ID NO: 37289 - RNA, 19 nt, artificial
  Chemically synthesized
uuauuuuuccaacagcuaa

SEQ ID NO: 37290 - RNA, 19 nt, artificial
  Chemically synthesized
ggaaacauuugcacucuuu

SEQ ID NO: 37291 - RNA, 19 nt, artificial
  Chemically synthesized
ccaagcgcauuacccacuu

SEQ ID NO: 37292 - RNA, 19 nt, artificial
  Chemically synthesized
aaggguauggucaucuguu

SEQ ID NO: 37293 - RNA, 19 nt, artificial
  Chemically synthesized
agcugccuuaaaaaaaaau

SEQ ID NO: 37294 - RNA, 19 nt, artificial
  Chemically synthesized
acaauagucuagagaagca

SEQ ID NO: 37295 - RNA, 19 nt, artificial
  Chemically synthesized
agauaaaauuaaaugcucu

SEQ ID NO: 37296 - RNA, 19 nt, artificial
  Chemically synthesized
ugcagcacaagaaggacca

SEQ ID NO: 37297 - RNA, 19 nt, artificial
  Chemically synthesized
uuguuguuuuuguugaaaa

SEQ ID NO: 37298 - RNA, 19 nt, artificial
  Chemically synthesized
gauaaaauuaaaugcucuu

SEQ ID NO: 37299 - RNA, 19 nt, artificial
  Chemically synthesized
cuuuuuucuuuguuguuuu

SEQ ID NO: 37300 - RNA, 19 nt, artificial
  Chemically synthesized
uaaaagcagaucuuuuuaa

SEQ ID NO: 37301 - RNA, 19 nt, artificial
  Chemically synthesized
uacuucuguaacuuaagaa

SEQ ID NO: 37302 - RNA, 19 nt, artificial
  Chemically synthesized
aacugacuggaaacuucag

SEQ ID NO: 37303 - RNA, 19 nt, artificial
  Chemically synthesized
ggcauuuaaaucauauuuu

SEQ ID NO: 37304 - RNA, 19 nt, artificial
  Chemically synthesized
gguaaaagcuuugguuugu

SEQ ID NO: 37305 - RNA, 19 nt, artificial
  Chemically synthesized
aaaaaauaaaggccuuauu

SEQ ID NO: 37306 - RNA, 19 nt, artificial
  Chemically synthesized
uuuagaagucaguagaaua

SEQ ID NO: 37307 - RNA, 19 nt, artificial
  Chemically synthesized
auccuucaauuucuguaua

SEQ ID NO: 37308 - RNA, 19 nt, artificial
  Chemically synthesized
auuugguaagcuuuaucau

SEQ ID NO: 37309 - RNA, 19 nt, artificial
  Chemically synthesized
ccuuaaagacauuuaagcu

SEQ ID NO: 37310 - RNA, 19 nt, artificial
  Chemically synthesized
caaaggguauggucaucug

SEQ ID NO: 37311 - RNA, 19 nt, artificial
  Chemically synthesized
uccucaaaggguaugguca

SEQ ID NO: 37312 - RNA, 19 nt, artificial
  Chemically synthesized
ggaguaaacaauagucuag

SEQ ID NO: 37313 - RNA, 19 nt, artificial
  Chemically synthesized
uuuuagcaguaauuaaaga

SEQ ID NO: 37314 - RNA, 19 nt, artificial
  Chemically synthesized
uugcaaauguaguguauca

SEQ ID NO: 37315 - RNA, 19 nt, artificial
  Chemically synthesized
aaaagcaaguuucuuugua

SEQ ID NO: 37316 - RNA, 19 nt, artificial
  Chemically synthesized
aaaugcucuuauuuuucca

SEQ ID NO: 37317 - RNA, 19 nt, artificial
  Chemically synthesized
uggacuuuuuaaacccucu

SEQ ID NO: 37318 - RNA, 19 nt, artificial
  Chemically synthesized
agcccacugacagaccuua

SEQ ID NO: 37319 - RNA, 19 nt, artificial
  Chemically synthesized
cgucaucuccaacaucgag

SEQ ID NO: 37320 - RNA, 19 nt, artificial
  Chemically synthesized
ucaucuguuguuaaauuau

SEQ ID NO: 37321 - RNA, 19 nt, artificial
  Chemically synthesized
gcuagagaguuugaggauu

SEQ ID NO: 37322 - RNA, 19 nt, artificial
  Chemically synthesized
aagauacuucuguaacuua

SEQ ID NO: 37323 - RNA, 19 nt, artificial
  Chemically synthesized
ugucuuuagguaaaagcuu

SEQ ID NO: 37324 - RNA, 19 nt, artificial
  Chemically synthesized
auaaaagcagaucuuuuua

SEQ ID NO: 37325 - RNA, 19 nt, artificial
  Chemically synthesized
auuccacuugcuaaaauua

SEQ ID NO: 37326 - RNA, 19 nt, artificial
  Chemically synthesized
aagcaaguuucuuuguauu

SEQ ID NO: 37327 - RNA, 19 nt, artificial
  Chemically synthesized
uauuuauuuuguaaggaga

SEQ ID NO: 37328 - RNA, 19 nt, artificial
  Chemically synthesized
aacuacucuuaguugaaca

SEQ ID NO: 37329 - RNA, 19 nt, artificial
  Chemically synthesized
aagcucuggagacuucuga

SEQ ID NO: 37330 - RNA, 19 nt, artificial
  Chemically synthesized
cugcugggaaacauuugca

SEQ ID NO: 37331 - RNA, 19 nt, artificial
  Chemically synthesized
ggaaacuuguuucuuuuuu

SEQ ID NO: 37332 - RNA, 19 nt, artificial
  Chemically synthesized
auuaugggaguaaacaaua

SEQ ID NO: 37333 - RNA, 19 nt, artificial
  Chemically synthesized
uucugggaauguuucagca

SEQ ID NO: 37334 - RNA, 19 nt, artificial
  Chemically synthesized
uuaaagacauuuaagcuaa

SEQ ID NO: 37335 - RNA, 19 nt, artificial
  Chemically synthesized
gcaguuaaccuucaagaca

SEQ ID NO: 37336 - RNA, 19 nt, artificial
  Chemically synthesized
cagaacaccagcaguuaac

SEQ ID NO: 37337 - RNA, 19 nt, artificial
  Chemically synthesized
acuccagcuccuacuacag

SEQ ID NO: 37338 - RNA, 19 nt, artificial
  Chemically synthesized
aucuguuguuaaauuaugu

SEQ ID NO: 37339 - RNA, 19 nt, artificial
  Chemically synthesized
cccggauuacaaguaccag

SEQ ID NO: 37340 - RNA, 19 nt, artificial
  Chemically synthesized
aaggaccacccggauuaca

SEQ ID NO: 37341 - RNA, 19 nt, artificial
  Chemically synthesized
cagaacuccagcuccuacu

SEQ ID NO: 37342 - RNA, 19 nt, artificial
  Chemically synthesized
aaacaauagucuagagaag

SEQ ID NO: 37343 - RNA, 19 nt, artificial
  Chemically synthesized
guuaaauuauguucuuaac

SEQ ID NO: 37344 - RNA, 19 nt, artificial
  Chemically synthesized
aaaaauaaaggccuuauuu

SEQ ID NO: 37345 - RNA, 19 nt, artificial
  Chemically synthesized
aaaauaaaggccuuauuuu

SEQ ID NO: 37346 - RNA, 19 nt, artificial
  Chemically synthesized
uaugauucauuaccauuuu

SEQ ID NO: 37347 - RNA, 19 nt, artificial
  Chemically synthesized
gaauaaaaucuuaaagcac

SEQ ID NO: 37348 - RNA, 19 nt, artificial
  Chemically synthesized
cuuaaagacauuuaagcua

SEQ ID NO: 37349 - RNA, 19 nt, artificial
  Chemically synthesized
acucuuaguugaacagugu

SEQ ID NO: 37350 - RNA, 19 nt, artificial
  Chemically synthesized
cguguuuuguuuguuucac

SEQ ID NO: 37351 - RNA, 19 nt, artificial
  Chemically synthesized
caucuguuguuaaauuaug

SEQ ID NO: 37352 - RNA, 19 nt, artificial
  Chemically synthesized
cagauuugcuuucucuuac

SEQ ID NO: 37353 - RNA, 19 nt, artificial
  Chemically synthesized
uaagcuaaaggcaacucgu

SEQ ID NO: 37354 - RNA, 19 nt, artificial
  Chemically synthesized
ggagaugaaaucuguucug

SEQ ID NO: 37355 - RNA, 19 nt, artificial
  Chemically synthesized
aaagaagagaaaaacaccu

SEQ ID NO: 37356 - RNA, 19 nt, artificial
  Chemically synthesized
auacauugcauuaaaaaga

SEQ ID NO: 37357 - RNA, 19 nt, artificial
  Chemically synthesized
gaccuucgaugucaacgag

SEQ ID NO: 37358 - RNA, 19 nt, artificial
  Chemically synthesized
guguaucacugagucauuu

SEQ ID NO: 37359 - RNA, 19 nt, artificial
  Chemically synthesized
uuuggacuuuguaauuauu

SEQ ID NO: 37360 - RNA, 19 nt, artificial
  Chemically synthesized
aaaaaaaaauaaaggccuu

SEQ ID NO: 37361 - RNA, 19 nt, artificial
  Chemically synthesized
auuucuguauaaaagcaga

SEQ ID NO: 37362 - RNA, 19 nt, artificial
  Chemically synthesized
uguauaaaugccuuuuugu

SEQ ID NO: 37363 - RNA, 19 nt, artificial
  Chemically synthesized
cgacgucaucuccaacauc

SEQ ID NO: 37364 - RNA, 19 nt, artificial
  Chemically synthesized
guacagauuugcuuucucu

SEQ ID NO: 37365 - RNA, 19 nt, artificial
  Chemically synthesized
caccuugagccuuaaaacg

SEQ ID NO: 37366 - RNA, 19 nt, artificial
  Chemically synthesized
acuggacuuuuuaaacccu

SEQ ID NO: 37367 - RNA, 19 nt, artificial
  Chemically synthesized
guaugauucauuaccauuu

SEQ ID NO: 37368 - RNA, 19 nt, artificial
  Chemically synthesized
gaccacccggauuacaagu

SEQ ID NO: 37369 - RNA, 19 nt, artificial
  Chemically synthesized
aaugcucuuauuuuuccaa

SEQ ID NO: 37370 - RNA, 19 nt, artificial
  Chemically synthesized
caacagcuaaacuacucuu

SEQ ID NO: 37371 - RNA, 19 nt, artificial
  Chemically synthesized
cacaaaaacaaugcaagca

SEQ ID NO: 37372 - RNA, 19 nt, artificial
  Chemically synthesized
gaaagcggagcucgaaacu

SEQ ID NO: 37373 - RNA, 19 nt, artificial
  Chemically synthesized
ucgaugucaacgaguuuga

SEQ ID NO: 37374 - RNA, 19 nt, artificial
  Chemically synthesized
cuagcuuuucuugcaacca

SEQ ID NO: 37375 - RNA, 19 nt, artificial
  Chemically synthesized
agugugcccuagcuuuucu

SEQ ID NO: 37376 - RNA, 19 nt, artificial
  Chemically synthesized
guguucguguuuuguuugu

SEQ ID NO: 37377 - RNA, 19 nt, artificial
  Chemically synthesized
guagaauaaaaucuuaaag

SEQ ID NO: 37378 - RNA, 19 nt, artificial
  Chemically synthesized
uuuagcaguaauuaaagaa

SEQ ID NO: 37379 - RNA, 19 nt, artificial
  Chemically synthesized
uguucuuaacuguaaccag

SEQ ID NO: 37380 - RNA, 19 nt, artificial
  Chemically synthesized
acaauaaauauacauugca

SEQ ID NO: 37381 - RNA, 19 nt, artificial
  Chemically synthesized
aaucuguucugggaauguu

SEQ ID NO: 37382 - RNA, 19 nt, artificial
  Chemically synthesized
ggcauccuucaauuucugu

SEQ ID NO: 37383 - RNA, 19 nt, artificial
  Chemically synthesized
ccggauuacaaguaccagc

SEQ ID NO: 37384 - RNA, 19 nt, artificial
  Chemically synthesized
ucuuccuuaaagacauuua

SEQ ID NO: 37385 - RNA, 19 nt, artificial
  Chemically synthesized
uaaaaauaaccgaagaaag

SEQ ID NO: 37386 - RNA, 19 nt, artificial
  Chemically synthesized
aaucauauuuugucuuuag

SEQ ID NO: 37387 - RNA, 19 nt, artificial
  Chemically synthesized
aagucaguagaauaaaauc

SEQ ID NO: 37388 - RNA, 19 nt, artificial
  Chemically synthesized
ugauucauuaccauuuuga

SEQ ID NO: 37389 - RNA, 19 nt, artificial
  Chemically synthesized
uauuccucacccuagauuu

SEQ ID NO: 37390 - RNA, 19 nt, artificial
  Chemically synthesized
aauaaaaucuuaaagcacu

SEQ ID NO: 37391 - RNA, 19 nt, artificial
  Chemically synthesized
cuuuuuuuguauaaaugag

SEQ ID NO: 37392 - RNA, 19 nt, artificial
  Chemically synthesized
cugcagucuuaagaaagag

SEQ ID NO: 37393 - RNA, 19 nt, artificial
  Chemically synthesized
ucuuuguauuccucacccu

SEQ ID NO: 37394 - RNA, 19 nt, artificial
  Chemically synthesized
ugggaguaaacaauagucu

SEQ ID NO: 37395 - RNA, 19 nt, artificial
  Chemically synthesized
uucacuuguuucccuccca

SEQ ID NO: 37396 - RNA, 19 nt, artificial
  Chemically synthesized
ucuguaacuuaagaaaccu

SEQ ID NO: 37397 - RNA, 19 nt, artificial
  Chemically synthesized
cagugugcccuagcuuuuc

SEQ ID NO: 37398 - RNA, 19 nt, artificial
  Chemically synthesized
ugcgauuuaaggaggagcu

SEQ ID NO: 37399 - RNA, 19 nt, artificial
  Chemically synthesized
cauuuaaaaacagaauugu

SEQ ID NO: 37400 - RNA, 19 nt, artificial
  Chemically synthesized
agcgacgucaucuccaaca

SEQ ID NO: 37401 - RNA, 19 nt, artificial
  Chemically synthesized
uugucuuuagguaaaagcu

SEQ ID NO: 37402 - RNA, 19 nt, artificial
  Chemically synthesized
aguacgacuacaccgacca

SEQ ID NO: 37403 - RNA, 19 nt, artificial
  Chemically synthesized
agcgaacgcacaucaagac

SEQ ID NO: 37404 - RNA, 19 nt, artificial
  Chemically synthesized
uguuguuuuuguugaaaac

SEQ ID NO: 37405 - RNA, 19 nt, artificial
  Chemically synthesized
aagaagagaaaaacaccuu

SEQ ID NO: 37406 - RNA, 19 nt, artificial
  Chemically synthesized
uauaaaagcagaucuuuuu

SEQ ID NO: 37407 - RNA, 19 nt, artificial
  Chemically synthesized
ccuuuuuucuuuguuguuu

SEQ ID NO: 37408 - RNA, 19 nt, artificial
  Chemically synthesized
caccuucaccuacaugaac

SEQ ID NO: 37409 - RNA, 19 nt, artificial
  Chemically synthesized
uuccacuugcuaaaauuau

SEQ ID NO: 37410 - RNA, 19 nt, artificial
  Chemically synthesized
ucaagacauuccacuugcu

SEQ ID NO: 37411 - RNA, 19 nt, artificial
  Chemically synthesized
caagcucuggagacuucug

SEQ ID NO: 37412 - RNA, 19 nt, artificial
  Chemically synthesized
aaaacaaacuggaaacuug

SEQ ID NO: 37413 - RNA, 19 nt, artificial
  Chemically synthesized
guaaacaauagucuagaga

SEQ ID NO: 37414 - RNA, 19 nt, artificial
  Chemically synthesized
cacccggauuacaaguacc

SEQ ID NO: 37415 - RNA, 19 nt, artificial
  Chemically synthesized
aaaaucuuaaagcacucau

SEQ ID NO: 37416 - RNA, 19 nt, artificial
  Chemically synthesized
agauuuguauaaaugccuu

SEQ ID NO: 37417 - RNA, 19 nt, artificial
  Chemically synthesized
ugagucauuugcaguguuu

SEQ ID NO: 37418 - RNA, 19 nt, artificial
  Chemically synthesized
uuagguaaaagcuuugguu

SEQ ID NO: 37419 - RNA, 19 nt, artificial
  Chemically synthesized
caacucguacccaaauuuc

SEQ ID NO: 37420 - RNA, 19 nt, artificial
  Chemically synthesized
ccacugacagaccuuaauc

SEQ ID NO: 37421 - RNA, 19 nt, artificial
  Chemically synthesized
aacagcuaaacuacucuua

SEQ ID NO: 37422 - RNA, 19 nt, artificial
  Chemically synthesized
ccuuaaaaaaaaauaaagg

SEQ ID NO: 37423 - RNA, 19 nt, artificial
  Chemically synthesized
uuuaaaauagguuguugga

SEQ ID NO: 37424 - RNA, 19 nt, artificial
  Chemically synthesized
uuauguucuuaacuguaac

SEQ ID NO: 37425 - RNA, 19 nt, artificial
  Chemically synthesized
gugcuaaaucucucugccu

SEQ ID NO: 37426 - RNA, 19 nt, artificial
  Chemically synthesized
gaaaaaaguccucugugag

SEQ ID NO: 37427 - RNA, 19 nt, artificial
  Chemically synthesized
aaugagagauugcaaaugu

SEQ ID NO: 37428 - RNA, 19 nt, artificial
  Chemically synthesized
ucauauuuugucuuuaggu

SEQ ID NO: 37429 - RNA, 19 nt, artificial
  Chemically synthesized
agcgcauuacccacuugug

SEQ ID NO: 37430 - RNA, 19 nt, artificial
  Chemically synthesized
uucaauuucuguauaaaag

SEQ ID NO: 37431 - RNA, 19 nt, artificial
  Chemically synthesized
agucaguagaauaaaaucu

SEQ ID NO: 37432 - RNA, 19 nt, artificial
  Chemically synthesized
gcuuuucuugcaaccagag

SEQ ID NO: 37433 - RNA, 19 nt, artificial
  Chemically synthesized
agguuguuggagcuuuccu

SEQ ID NO: 37434 - RNA, 19 nt, artificial
  Chemically synthesized
cggauuacaaguaccagcc

SEQ ID NO: 37435 - RNA, 19 nt, artificial
  Chemically synthesized
gguauggucaucuguuguu

SEQ ID NO: 37436 - RNA, 19 nt, artificial
  Chemically synthesized
aacaaacuggaaacuuguu

SEQ ID NO: 37437 - RNA, 19 nt, artificial
  Chemically synthesized
aacgagaaacuggacuuuu

SEQ ID NO: 37438 - RNA, 19 nt, artificial
  Chemically synthesized
gaacaccagcaguuaaccu

SEQ ID NO: 37439 - RNA, 19 nt, artificial
  Chemically synthesized
uguucguguuuuguuuguu

SEQ ID NO: 37440 - RNA, 19 nt, artificial
  Chemically synthesized
uggaaacuuguuucuuuuu

SEQ ID NO: 37441 - RNA, 19 nt, artificial
  Chemically synthesized
uguuuuguuuguuucacuu

SEQ ID NO: 37442 - RNA, 19 nt, artificial
  Chemically synthesized
agaggaccaaccagaauuc

SEQ ID NO: 37443 - RNA, 19 nt, artificial
  Chemically synthesized
agcuaaaggcaacucguac

SEQ ID NO: 37444 - RNA, 19 nt, artificial
  Chemically synthesized
uuauuaaaagcaaguuucu

SEQ ID NO: 37445 - RNA, 19 nt, artificial
  Chemically synthesized
aaaaaaaauaaaggccuua

SEQ ID NO: 37446 - RNA, 19 nt, artificial
  Chemically synthesized
cuucuguaacuuaagaaac

SEQ ID NO: 37447 - RNA, 19 nt, artificial
  Chemically synthesized
uucucuccgugaaacuuac

SEQ ID NO: 37448 - RNA, 19 nt, artificial
  Chemically synthesized
accuuaaucuuaauuacug

SEQ ID NO: 37449 - RNA, 19 nt, artificial
  Chemically synthesized
ucccuuuuuucuuuguugu

SEQ ID NO: 37450 - RNA, 19 nt, artificial
  Chemically synthesized
accacccggauuacaagua

SEQ ID NO: 37451 - RNA, 19 nt, artificial
  Chemically synthesized
gagaaucgugugaucagug

SEQ ID NO: 37452 - RNA, 19 nt, artificial
  Chemically synthesized
uuuguuuguuucacuuguu

SEQ ID NO: 37453 - RNA, 19 nt, artificial
  Chemically synthesized
uugcuuaauuccucaggcu

SEQ ID NO: 37454 - RNA, 19 nt, artificial
  Chemically synthesized
agcuaaacuacucuuaguu

SEQ ID NO: 37455 - RNA, 19 nt, artificial
  Chemically synthesized
aaauaaaggccuuauuuug

SEQ ID NO: 37456 - RNA, 19 nt, artificial
  Chemically synthesized
augaccuauccaagcgcau

SEQ ID NO: 37457 - RNA, 19 nt, artificial
  Chemically synthesized
gcucuuauuuuuccaacag

SEQ ID NO: 37458 - RNA, 19 nt, artificial
  Chemically synthesized
aaucaacgagaaacuggac

SEQ ID NO: 37459 - RNA, 19 nt, artificial
  Chemically synthesized
aaaaaaauaaaggccuuau

SEQ ID NO: 37460 - RNA, 19 nt, artificial
  Chemically synthesized
uccaccuucaccuacauga

SEQ ID NO: 37461 - RNA, 19 nt, artificial
  Chemically synthesized
cuguaacuuaagaaaccug

SEQ ID NO: 37462 - RNA, 19 nt, artificial
  Chemically synthesized
cccuagcuuuucuugcaac

SEQ ID NO: 37463 - RNA, 19 nt, artificial
  Chemically synthesized
acugacuggaaacuucagu

SEQ ID NO: 37464 - RNA, 19 nt, artificial
  Chemically synthesized
acccaaauuuccaagacac

SEQ ID NO: 37465 - RNA, 19 nt, artificial
  Chemically synthesized
cuagauuuguauaaaugcc

SEQ ID NO: 37466 - RNA, 19 nt, artificial
  Chemically synthesized
ccuuugcuuguucacugca

SEQ ID NO: 37467 - RNA, 19 nt, artificial
  Chemically synthesized
ugcuuaauuccucaggcuu

SEQ ID NO: 37468 - RNA, 19 nt, artificial
  Chemically synthesized
cuggagacuucugaacgag

SEQ ID NO: 37469 - RNA, 19 nt, artificial
  Chemically synthesized
uagguaaaagcuuugguuu

SEQ ID NO: 37470 - RNA, 19 nt, artificial
  Chemically synthesized
cugacuggaaacuucagug

SEQ ID NO: 37471 - RNA, 19 nt, artificial
  Chemically synthesized
aaaaacaaugcaagcaugu

SEQ ID NO: 37472 - RNA, 19 nt, artificial
  Chemically synthesized
uguuuggacuuuguaauua

SEQ ID NO: 37473 - RNA, 19 nt, artificial
  Chemically synthesized
aaagauacuucuguaacuu

SEQ ID NO: 37474 - RNA, 19 nt, artificial
  Chemically synthesized
uuuucuugcaaccagagua

SEQ ID NO: 37475 - RNA, 19 nt, artificial
  Chemically synthesized
gauauauuaacaguuuuag

SEQ ID NO: 37476 - RNA, 19 nt, artificial
  Chemically synthesized
aaagaaaaaaguccucugu

SEQ ID NO: 37477 - RNA, 19 nt, artificial
  Chemically synthesized
uuuguuguuuuuguugaaa

SEQ ID NO: 37478 - RNA, 19 nt, artificial
  Chemically synthesized
cuaaaucucucugccuguu

SEQ ID NO: 37479 - RNA, 19 nt, artificial
  Chemically synthesized
uaucacugagucauuugca

SEQ ID NO: 37480 - RNA, 19 nt, artificial
  Chemically synthesized
uauuaacaguuuuagaagu

SEQ ID NO: 37481 - RNA, 19 nt, artificial
  Chemically synthesized
gaucuuuuuaaaaagauac

SEQ ID NO: 37482 - RNA, 19 nt, artificial
  Chemically synthesized
ggauuacaaguaccagccg

SEQ ID NO: 37483 - RNA, 19 nt, artificial
  Chemically synthesized
uuuuuguauaaaugagaga

SEQ ID NO: 37484 - RNA, 19 nt, artificial
  Chemically synthesized
uguuguuaaauuauguucu

SEQ ID NO: 37485 - RNA, 19 nt, artificial
  Chemically synthesized
ucacuuguuucccucccag

SEQ ID NO: 37486 - RNA, 19 nt, artificial
  Chemically synthesized
ugccuuuuuguccaucccu

SEQ ID NO: 37487 - RNA, 19 nt, artificial
  Chemically synthesized
uaaaugagagauugcaaau

SEQ ID NO: 37488 - RNA, 19 nt, artificial
  Chemically synthesized
uagcuuuucuugcaaccag

SEQ ID NO: 37489 - RNA, 19 nt, artificial
  Chemically synthesized
gugaggaauauucucuauu

SEQ ID NO: 37490 - RNA, 19 nt, artificial
  Chemically synthesized
gcgauuuaaggaggagcug

SEQ ID NO: 37491 - RNA, 19 nt, artificial
  Chemically synthesized
uuccaacagcuaaacuacu

SEQ ID NO: 37492 - RNA, 19 nt, artificial
  Chemically synthesized
uuucuuuguuguuuuuguu

SEQ ID NO: 37493 - RNA, 19 nt, artificial
  Chemically synthesized
ugcauuuccuccugccuuu

SEQ ID NO: 37494 - RNA, 19 nt, artificial
  Chemically synthesized
ucuguuguuaaauuauguu

SEQ ID NO: 37495 - RNA, 19 nt, artificial
  Chemically synthesized
cucugugaggaauauucuc

SEQ ID NO: 37496 - RNA, 19 nt, artificial
  Chemically synthesized
guuuuuguugaaaacaaac

SEQ ID NO: 37497 - RNA, 19 nt, artificial
  Chemically synthesized
ucucagaacaccagcaguu

SEQ ID NO: 37498 - RNA, 19 nt, artificial
  Chemically synthesized
ucugaacgagagcgagaag

SEQ ID NO: 37499 - RNA, 19 nt, artificial
  Chemically synthesized
ccugccuuugcuuguucac

SEQ ID NO: 37500 - RNA, 19 nt, artificial
  Chemically synthesized
agguaaaagcuuugguuug

SEQ ID NO: 37501 - RNA, 19 nt, artificial
  Chemically synthesized
uuguuuguuucacuuguuu

SEQ ID NO: 37502 - RNA, 19 nt, artificial
  Chemically synthesized
ugggaaacauuugcacucu

SEQ ID NO: 37503 - RNA, 19 nt, artificial
  Chemically synthesized
guuguuuuuguugaaaaca

SEQ ID NO: 37504 - RNA, 19 nt, artificial
  Chemically synthesized
uaaucuuaauuacugcugu

SEQ ID NO: 37505 - RNA, 19 nt, artificial
  Chemically synthesized
uuccuuaaagacauuuaag

SEQ ID NO: 37506 - RNA, 19 nt, artificial
  Chemically synthesized
uuugcacucuuuuagugca

SEQ ID NO: 37507 - RNA, 19 nt, artificial
  Chemically synthesized
uaaagaagagaaaaacacc

SEQ ID NO: 37508 - RNA, 19 nt, artificial
  Chemically synthesized
gagacuucugaacgagagc

SEQ ID NO: 37509 - RNA, 19 nt, artificial
  Chemically synthesized
cuucuuuaaaauagguugu

SEQ ID NO: 37510 - RNA, 19 nt, artificial
  Chemically synthesized
cuagagaguuugaggauug

SEQ ID NO: 37511 - RNA, 19 nt, artificial
  Chemically synthesized
gcauuugguaagcuuuauc

SEQ ID NO: 37512 - RNA, 19 nt, artificial
  Chemically synthesized
ugucaacgaguuugaccag

SEQ ID NO: 37513 - RNA, 19 nt, artificial
  Chemically synthesized
uuugcaauuaugggaguaa

SEQ ID NO: 37514 - RNA, 19 nt, artificial
  Chemically synthesized
uauacauugcauuaaaaag

SEQ ID NO: 37515 - RNA, 19 nt, artificial
  Chemically synthesized
gcucuggagacuucugaac

SEQ ID NO: 37516 - RNA, 19 nt, artificial
  Chemically synthesized
ucaacgagaaacuggacuu

SEQ ID NO: 37517 - RNA, 19 nt, artificial
  Chemically synthesized
uuuuuagcaguaauuaaag

SEQ ID NO: 37518 - RNA, 19 nt, artificial
  Chemically synthesized
uuaagaaagagguaaaagg

SEQ ID NO: 37519 - RNA, 19 nt, artificial
  Chemically synthesized
aagagguaaaaggcaagca

SEQ ID NO: 37520 - RNA, 19 nt, artificial
  Chemically synthesized
caagcgcauuacccacuug

SEQ ID NO: 37521 - RNA, 19 nt, artificial
  Chemically synthesized
uaacaguuuuagaagucag

SEQ ID NO: 37522 - RNA, 19 nt, artificial
  Chemically synthesized
uuaacaguuuuagaaguca

SEQ ID NO: 37523 - RNA, 19 nt, artificial
  Chemically synthesized
gaucagugugcuaaaucuc

SEQ ID NO: 37524 - RNA, 19 nt, artificial
  Chemically synthesized
agagaguuugaggauugcu

SEQ ID NO: 37525 - RNA, 19 nt, artificial
  Chemically synthesized
aagaaggaccacccggauu

SEQ ID NO: 37526 - RNA, 19 nt, artificial
  Chemically synthesized
uaguguaucacugagucau

SEQ ID NO: 37527 - RNA, 19 nt, artificial
  Chemically synthesized
aggaagucggugaagaacg

SEQ ID NO: 37528 - RNA, 19 nt, artificial
  Chemically synthesized
cuacaucuucucuuggagu

SEQ ID NO: 37529 - RNA, 19 nt, artificial
  Chemically synthesized
ccacuuuugcucuuuuucc

SEQ ID NO: 37530 - RNA, 19 nt, artificial
  Chemically synthesized
ucuuuguuguuuuuguuga

SEQ ID NO: 37531 - RNA, 19 nt, artificial
  Chemically synthesized
guauuccucacccuagauu

SEQ ID NO: 37532 - RNA, 19 nt, artificial
  Chemically synthesized
uuuguauuccucacccuag

SEQ ID NO: 37533 - RNA, 19 nt, artificial
  Chemically synthesized
uagagaagcauuugguaag

SEQ ID NO: 37534 - RNA, 19 nt, artificial
  Chemically synthesized
aagcgcauuacccacuugu

SEQ ID NO: 37535 - RNA, 19 nt, artificial
  Chemically synthesized
cuuaauuccucaggcuuug

SEQ ID NO: 37536 - RNA, 19 nt, artificial
  Chemically synthesized
aaaucuguucugggaaugu

SEQ ID NO: 37537 - RNA, 19 nt, artificial
  Chemically synthesized
cuuaagaaagagguaaaag

SEQ ID NO: 37538 - RNA, 19 nt, artificial
  Chemically synthesized
uccuguuguauuaacauuu

SEQ ID NO: 37539 - RNA, 19 nt, artificial
  Chemically synthesized
ugcucaaaggcuacgacug

SEQ ID NO: 37540 - RNA, 19 nt, artificial
  Chemically synthesized
gaaaacaaacuggaaacuu

SEQ ID NO: 37541 - RNA, 19 nt, artificial
  Chemically synthesized
caucuucucuuggagugag

SEQ ID NO: 37542 - RNA, 19 nt, artificial
  Chemically synthesized
uuucuugcaaccagaguau

SEQ ID NO: 37543 - RNA, 19 nt, artificial
  Chemically synthesized
uauuaaaagcaaguuucuu

SEQ ID NO: 37544 - RNA, 19 nt, artificial
  Chemically synthesized
gauuuguauaaaugccuuu

SEQ ID NO: 37545 - RNA, 19 nt, artificial
  Chemically synthesized
aaaucucucugccuguuug

SEQ ID NO: 37546 - RNA, 19 nt, artificial
  Chemically synthesized
aaaaaguccucugugagga

SEQ ID NO: 37547 - RNA, 19 nt, artificial
  Chemically synthesized
uguauaaaagcagaucuuu

SEQ ID NO: 37548 - RNA, 19 nt, artificial
  Chemically synthesized
aauguaguguaucacugag

SEQ ID NO: 37549 - RNA, 19 nt, artificial
  Chemically synthesized
uaccuucuuuaaaauaggu

SEQ ID NO: 37550 - RNA, 19 nt, artificial
  Chemically synthesized
uuaaagcacucauaauaug

SEQ ID NO: 37551 - RNA, 19 nt, artificial
  Chemically synthesized
auggagcagcgaaaucaac

SEQ ID NO: 37552 - RNA, 19 nt, artificial
  Chemically synthesized
uuuucuuuguuguuuuugu

SEQ ID NO: 37553 - RNA, 19 nt, artificial
  Chemically synthesized
acaguacgacuacaccgac

SEQ ID NO: 37554 - RNA, 19 nt, artificial
  Chemically synthesized
uauuuuguaaggagagguu

SEQ ID NO: 37555 - RNA, 19 nt, artificial
  Chemically synthesized
ccuucaccuacaugaaccc

SEQ ID NO: 37556 - RNA, 19 nt, artificial
  Chemically synthesized
uaagaaagagguaaaaggc

SEQ ID NO: 37557 - RNA, 19 nt, artificial
  Chemically synthesized
uuugcuuguucacugcagu

SEQ ID NO: 37558 - RNA, 19 nt, artificial
  Chemically synthesized
uguaugauucauuaccauu

SEQ ID NO: 37559 - RNA, 19 nt, artificial
  Chemically synthesized
agagauugcaaauguagug

SEQ ID NO: 37560 - RNA, 19 nt, artificial
  Chemically synthesized
guauuuuuguacagauuug

SEQ ID NO: 37561 - RNA, 19 nt, artificial
  Chemically synthesized
cccacuuuugcucuuuuuc

SEQ ID NO: 37562 - RNA, 19 nt, artificial
  Chemically synthesized
uuguccaucccuuuuuucu

SEQ ID NO: 37563 - RNA, 19 nt, artificial
  Chemically synthesized
uaaaggcaacucguaccca

SEQ ID NO: 37564 - RNA, 19 nt, artificial
  Chemically synthesized
uuaccuucuuuaaaauagg

SEQ ID NO: 37565 - RNA, 19 nt, artificial
  Chemically synthesized
agucauuugcaguguuuuc

SEQ ID NO: 37566 - RNA, 19 nt, artificial
  Chemically synthesized
cccaaaccuuuuguucucu

SEQ ID NO: 37567 - RNA, 19 nt, artificial
  Chemically synthesized
cuuugcuuguucacugcag

SEQ ID NO: 37568 - RNA, 19 nt, artificial
  Chemically synthesized
uuuuguuuguuucacuugu

SEQ ID NO: 37569 - RNA, 19 nt, artificial
  Chemically synthesized
uguucucuccgugaaacuu

SEQ ID NO: 37570 - RNA, 19 nt, artificial
  Chemically synthesized
caaauguaguguaucacug

SEQ ID NO: 37571 - RNA, 19 nt, artificial
  Chemically synthesized
cuugagccuuaaaacggug

SEQ ID NO: 37572 - RNA, 19 nt, artificial
  Chemically synthesized
aacucguacccaaauuucc

SEQ ID NO: 37573 - RNA, 19 nt, artificial
  Chemically synthesized
gauuuaaggaggagcugcc

SEQ ID NO: 37574 - RNA, 19 nt, artificial
  Chemically synthesized
guauaaaugccuuuuuguc

SEQ ID NO: 37575 - RNA, 19 nt, artificial
  Chemically synthesized
aaccuuuuguucucuccgu

SEQ ID NO: 37576 - RNA, 19 nt, artificial
  Chemically synthesized
aauuaaagaaaaaaguccu

SEQ ID NO: 37577 - RNA, 19 nt, artificial
  Chemically synthesized
uugcacucuuuuagugcau

SEQ ID NO: 37578 - RNA, 19 nt, artificial
  Chemically synthesized
cuggacuuuuuaaacccuc

SEQ ID NO: 37579 - RNA, 19 nt, artificial
  Chemically synthesized
ucgaaacugacuggaaacu

SEQ ID NO: 37580 - RNA, 19 nt, artificial
  Chemically synthesized
aaccgaagaaagagaggac

SEQ ID NO: 37581 - RNA, 19 nt, artificial
  Chemically synthesized
gugcauuuccuccugccuu

SEQ ID NO: 37582 - RNA, 19 nt, artificial
  Chemically synthesized
auggagaaucgugugauca

SEQ ID NO: 37583 - RNA, 19 nt, artificial
  Chemically synthesized
uucuguaacuuaagaaacc

SEQ ID NO: 37584 - RNA, 19 nt, artificial
  Chemically synthesized
cugggaauguuucagcagc

SEQ ID NO: 37585 - RNA, 19 nt, artificial
  Chemically synthesized
gucaucuccaacaucgaga

SEQ ID NO: 37586 - RNA, 19 nt, artificial
  Chemically synthesized
guaauuauuuuuuuagcag

SEQ ID NO: 37587 - RNA, 19 nt, artificial
  Chemically synthesized
guacccaaauuuccaagac

SEQ ID NO: 37588 - RNA, 19 nt, artificial
  Chemically synthesized
uacucuuaguugaacagug

SEQ ID NO: 37589 - RNA, 19 nt, artificial
  Chemically synthesized
auuccucacccuagauuug

SEQ ID NO: 37590 - RNA, 19 nt, artificial
  Chemically synthesized
guccucugugaggaauauu

SEQ ID NO: 37591 - RNA, 19 nt, artificial
  Chemically synthesized
auuaaaagcaaguuucuuu

SEQ ID NO: 37592 - RNA, 19 nt, artificial
  Chemically synthesized
ugggaauguuucagcagcc

SEQ ID NO: 37593 - RNA, 19 nt, artificial
  Chemically synthesized
gagcagcgaaaucaacgag

SEQ ID NO: 37594 - RNA, 19 nt, artificial
  Chemically synthesized
aagcaaaggagaugaaauc

SEQ ID NO: 37595 - RNA, 19 nt, artificial
  Chemically synthesized
guaugaaucuccuggaccc

SEQ ID NO: 37596 - RNA, 19 nt, artificial
  Chemically synthesized
aaacccucuucagagcaag

SEQ ID NO: 37597 - RNA, 19 nt, artificial
  Chemically synthesized
uuuuagaagucaguagaau

SEQ ID NO: 37598 - RNA, 19 nt, artificial
  Chemically synthesized
uuuguauaaaugagagauu

SEQ ID NO: 37599 - RNA, 19 nt, artificial
  Chemically synthesized
aaacuuguuucuuuuuuug

SEQ ID NO: 37600 - RNA, 19 nt, artificial
  Chemically synthesized
auuccucaggcuuugcgau

SEQ ID NO: 37601 - RNA, 19 nt, artificial
  Chemically synthesized
auguggaaggcagaugccu

SEQ ID NO: 37602 - RNA, 19 nt, artificial
  Chemically synthesized
agacauuuaagcuaaaggc

SEQ ID NO: 37603 - RNA, 19 nt, artificial
  Chemically synthesized
uaaaugccuuuuuguccau

SEQ ID NO: 37604 - RNA, 19 nt, artificial
  Chemically synthesized
cgauuuaaggaggagcugc

SEQ ID NO: 37605 - RNA, 19 nt, artificial
  Chemically synthesized
ccuagcuuuucuugcaacc

SEQ ID NO: 37606 - RNA, 19 nt, artificial
  Chemically synthesized
uuuuaaagaagagaaaaac

SEQ ID NO: 37607 - RNA, 19 nt, artificial
  Chemically synthesized
aucagugugcuaaaucucu

SEQ ID NO: 37608 - RNA, 19 nt, artificial
  Chemically synthesized
acagaccuuaaucuuaauu

SEQ ID NO: 37609 - RNA, 19 nt, artificial
  Chemically synthesized
auaaaaucuuaaagcacuc

SEQ ID NO: 37610 - RNA, 19 nt, artificial
  Chemically synthesized
aucaagacggagcagcuga

SEQ ID NO: 37611 - RNA, 19 nt, artificial
  Chemically synthesized
acuucugaacgagagcgag

SEQ ID NO: 37612 - RNA, 19 nt, artificial
  Chemically synthesized
uuuccaacagcuaaacuac

SEQ ID NO: 37613 - RNA, 19 nt, artificial
  Chemically synthesized
uguaguguaucacugaguc

SEQ ID NO: 37614 - RNA, 19 nt, artificial
  Chemically synthesized
uuguauaaaugccuuuuug

SEQ ID NO: 37615 - RNA, 19 nt, artificial
  Chemically synthesized
gagaagcauuugguaagcu

SEQ ID NO: 37616 - RNA, 19 nt, artificial
  Chemically synthesized
gcucacaguacgacuacac

SEQ ID NO: 37617 - RNA, 19 nt, artificial
  Chemically synthesized
uuaaagaagagaaaaacac

SEQ ID NO: 37618 - RNA, 19 nt, artificial
  Chemically synthesized
gaaaucaacgagaaacugg

SEQ ID NO: 37619 - RNA, 19 nt, artificial
  Chemically synthesized
gaaucgugugaucagugug

SEQ ID NO: 37620 - RNA, 19 nt, artificial
  Chemically synthesized
cuuuucuugcaaccagagu

SEQ ID NO: 37621 - RNA, 19 nt, artificial
  Chemically synthesized
cucuuaguugaacagugug

SEQ ID NO: 37622 - RNA, 19 nt, artificial
  Chemically synthesized
gcugcugggaaacauuugc

SEQ ID NO: 37623 - RNA, 19 nt, artificial
  Chemically synthesized
ucugaagaaggagagcgag

SEQ ID NO: 37624 - RNA, 19 nt, artificial
  Chemically synthesized
ccuuaaaacggugcugcug

SEQ ID NO: 37625 - RNA, 19 nt, artificial
  Chemically synthesized
uaaaaucuuaaagcacuca

SEQ ID NO: 37626 - RNA, 19 nt, artificial
  Chemically synthesized
cugccuuugcuuguucacu

SEQ ID NO: 37627 - RNA, 19 nt, artificial
  Chemically synthesized
guaaaagcuuugguuugug

SEQ ID NO: 37628 - RNA, 19 nt, artificial
  Chemically synthesized
uguucugggaauguuucag

SEQ ID NO: 37629 - RNA, 19 nt, artificial
  Chemically synthesized
uaaccgaagaaagagagga

SEQ ID NO: 37630 - RNA, 19 nt, artificial
  Chemically synthesized
uuauuuugcaauuauggga

SEQ ID NO: 37631 - RNA, 19 nt, artificial
  Chemically synthesized
uuaacuuugcuuaauuccu

SEQ ID NO: 37632 - RNA, 19 nt, artificial
  Chemically synthesized
cauuugcacucuuuuagug

SEQ ID NO: 37633 - RNA, 19 nt, artificial
  Chemically synthesized
uucuucaccgacuuccucc

SEQ ID NO: 37634 - RNA, 19 nt, artificial
  Chemically synthesized
uucuccaucauccuccacg

SEQ ID NO: 37635 - RNA, 19 nt, artificial
  Chemically synthesized
uuuuaauuaaaaccucucc

SEQ ID NO: 37636 - RNA, 19 nt, artificial
  Chemically synthesized
uuuccagucaguuucgagc

SEQ ID NO: 37637 - RNA, 19 nt, artificial
  Chemically synthesized
uuuaauuaaaaccucuccu

SEQ ID NO: 37638 - RNA, 19 nt, artificial
  Chemically synthesized
uuuuaaggcagcuccuccu

SEQ ID NO: 37639 - RNA, 19 nt, artificial
  Chemically synthesized
uuaaaauagagaauauucc

SEQ ID NO: 37640 - RNA, 19 nt, artificial
  Chemically synthesized
uuuuucuuuaauuacugcu

SEQ ID NO: 37641 - RNA, 19 nt, artificial
  Chemically synthesized
uuuuauucuacugacuucu

SEQ ID NO: 37642 - RNA, 19 nt, artificial
  Chemically synthesized
uagacuauuguuuacuccc

SEQ ID NO: 37643 - RNA, 19 nt, artificial
  Chemically synthesized
uuuuauacagaaauugaag

SEQ ID NO: 37644 - RNA, 19 nt, artificial
  Chemically synthesized
uuuauacaaaucuagggug

SEQ ID NO: 37645 - RNA, 19 nt, artificial
  Chemically synthesized
uuauuuuuuuuuaaggcag

SEQ ID NO: 37646 - RNA, 19 nt, artificial
  Chemically synthesized
uuuauacagaaauugaagg

SEQ ID NO: 37647 - RNA, 19 nt, artificial
  Chemically synthesized
uuaaaugucuuuaaggaag

SEQ ID NO: 37648 - RNA, 19 nt, artificial
  Chemically synthesized
uauaugauaaagcuuacca

SEQ ID NO: 37649 - RNA, 19 nt, artificial
  Chemically synthesized
uuaauuaaaaccucuccuu

SEQ ID NO: 37650 - RNA, 19 nt, artificial
  Chemically synthesized
uucucguugauuucgcugc

SEQ ID NO: 37651 - RNA, 19 nt, artificial
  Chemically synthesized
uuuguuuucaacaaaaaca

SEQ ID NO: 37652 - RNA, 19 nt, artificial
  Chemically synthesized
uuguuuuaauuaaaaccuc

SEQ ID NO: 37653 - RNA, 19 nt, artificial
  Chemically synthesized
uuauuuuuaggaucaucuc

SEQ ID NO: 37654 - RNA, 19 nt, artificial
  Chemically synthesized
uuaagauuuuauucuacug

SEQ ID NO: 37655 - RNA, 19 nt, artificial
  Chemically synthesized
uuuucuuuaauuacugcua

SEQ ID NO: 37656 - RNA, 19 nt, artificial
  Chemically synthesized
uuuaaagaagguaaaauug

SEQ ID NO: 37657 - RNA, 19 nt, artificial
  Chemically synthesized
uuuaaaaaguccaguuucu

SEQ ID NO: 37658 - RNA, 19 nt, artificial
  Chemically synthesized
uuaaagaagguaaaauugg

SEQ ID NO: 37659 - RNA, 19 nt, artificial
  Chemically synthesized
uuaaauguuaauacaacag

SEQ ID NO: 37660 - RNA, 19 nt, artificial
  Chemically synthesized
uuuuuucuuuaauuacugc

SEQ ID NO: 37661 - RNA, 19 nt, artificial
  Chemically synthesized
ucaguuucgagcuccgcuu

SEQ ID NO: 37662 - RNA, 19 nt, artificial
  Chemically synthesized
uuaugagugcuuuaagauu

SEQ ID NO: 37663 - RNA, 19 nt, artificial
  Chemically synthesized
uuaaguuacagaaguaucu

SEQ ID NO: 37664 - RNA, 19 nt, artificial
  Chemically synthesized
uuucccagcagcaccguuu

SEQ ID NO: 37665 - RNA, 19 nt, artificial
  Chemically synthesized
uucaacaaaaacaacaaag

SEQ ID NO: 37666 - RNA, 19 nt, artificial
  Chemically synthesized
auauaaggcagcccaaagg

SEQ ID NO: 37667 - RNA, 19 nt, artificial
  Chemically synthesized
uuuaaaaagaucugcuuuu

SEQ ID NO: 37668 - RNA, 19 nt, artificial
  Chemically synthesized
uaugagugcuuuaagauuu

SEQ ID NO: 37669 - RNA, 19 nt, artificial
  Chemically synthesized
uuuuaaaaagaucugcuuu

SEQ ID NO: 37670 - RNA, 19 nt, artificial
  Chemically synthesized
uuugaggaaagcuccaaca

SEQ ID NO: 37671 - RNA, 19 nt, artificial
  Chemically synthesized
uuuagcuuaaaugucuuua

SEQ ID NO: 37672 - RNA, 19 nt, artificial
  Chemically synthesized
guuauuuuuaggaucaucu

SEQ ID NO: 37673 - RNA, 19 nt, artificial
  Chemically synthesized
uaaauguuaauacaacagg

SEQ ID NO: 37674 - RNA, 19 nt, artificial
  Chemically synthesized
ucuuuuuaaaaagaucugc

SEQ ID NO: 37675 - RNA, 19 nt, artificial
  Chemically synthesized
uuaacugcugguguucuga

SEQ ID NO: 37676 - RNA, 19 nt, artificial
  Chemically synthesized
uguuuuaauuaaaaccucu

SEQ ID NO: 37677 - RNA, 19 nt, artificial
  Chemically synthesized
auuuauacaaaucuagggu

SEQ ID NO: 37678 - RNA, 19 nt, artificial
  Chemically synthesized
uaagauuuuauucuacuga

SEQ ID NO: 37679 - RNA, 19 nt, artificial
  Chemically synthesized
acugaucacacgauucucc

SEQ ID NO: 37680 - RNA, 19 nt, artificial
  Chemically synthesized
uuucuuaagacugcaguga

SEQ ID NO: 37681 - RNA, 19 nt, artificial
  Chemically synthesized
uuuuuaaaaagaucugcuu

SEQ ID NO: 37682 - RNA, 19 nt, artificial
  Chemically synthesized
uaaaucgcaaagccugagg

SEQ ID NO: 37683 - RNA, 19 nt, artificial
  Chemically synthesized
uauuuuuuuuuaaggcagc

SEQ ID NO: 37684 - RNA, 19 nt, artificial
  Chemically synthesized
augcaauguauauuuauug

SEQ ID NO: 37685 - RNA, 19 nt, artificial
  Chemically synthesized
uuucuuaaguuacagaagu

SEQ ID NO: 37686 - RNA, 19 nt, artificial
  Chemically synthesized
uuucuuuuuaaugcaaugu

SEQ ID NO: 37687 - RNA, 19 nt, artificial
  Chemically synthesized
uaccuaaagacaaaauaug

SEQ ID NO: 37688 - RNA, 19 nt, artificial
  Chemically synthesized
uaagauuaaggucugucag

SEQ ID NO: 37689 - RNA, 19 nt, artificial
  Chemically synthesized
uaagacugcagugaacaag

SEQ ID NO: 37690 - RNA, 19 nt, artificial
  Chemically synthesized
uuaaggaagaagaagaaga

SEQ ID NO: 37691 - RNA, 19 nt, artificial
  Chemically synthesized
ucuuucuucgguuauuuuu

SEQ ID NO: 37692 - RNA, 19 nt, artificial
  Chemically synthesized
ugcuuuuauacagaaauug

SEQ ID NO: 37693 - RNA, 19 nt, artificial
  Chemically synthesized
guuuuaauuaaaaccucuc

SEQ ID NO: 37694 - RNA, 19 nt, artificial
  Chemically synthesized
uucuuuuuaaugcaaugua

SEQ ID NO: 37695 - RNA, 19 nt, artificial
  Chemically synthesized
uaaaauagagaauauuccu

SEQ ID NO: 37696 - RNA, 19 nt, artificial
  Chemically synthesized
guaauuaagauuaaggucu

SEQ ID NO: 37697 - RNA, 19 nt, artificial
  Chemically synthesized
guacuggucaaacucguug

SEQ ID NO: 37698 - RNA, 19 nt, artificial
  Chemically synthesized
uaauuaagauuaaggucug

SEQ ID NO: 37699 - RNA, 19 nt, artificial
  Chemically synthesized
auuuuauucuacugacuuc

SEQ ID NO: 37700 - RNA, 19 nt, artificial
  Chemically synthesized
uaauuaaaaccucuccuua

SEQ ID NO: 37701 - RNA, 19 nt, artificial
  Chemically synthesized
aaaauagagaauauuccuc

SEQ ID NO: 37702 - RNA, 19 nt, artificial
  Chemically synthesized
aauuaaaaccucuccuuac

SEQ ID NO: 37703 - RNA, 19 nt, artificial
  Chemically synthesized
auauaugauaaagcuuacc

SEQ ID NO: 37704 - RNA, 19 nt, artificial
  Chemically synthesized
auauuaugagugcuuuaag

SEQ ID NO: 37705 - RNA, 19 nt, artificial
  Chemically synthesized
uuucaucuccuuugcuugc

SEQ ID NO: 37706 - RNA, 19 nt, artificial
  Chemically synthesized
ugcuuuaagauuuuauucu

SEQ ID NO: 37707 - RNA, 19 nt, artificial
  Chemically synthesized
auaauuacaaaguccaaac

SEQ ID NO: 37708 - RNA, 19 nt, artificial
  Chemically synthesized
ugaagguuaacugcuggug

SEQ ID NO: 37709 - RNA, 19 nt, artificial
  Chemically synthesized
aaaaauauguauaaauccc

SEQ ID NO: 37710 - RNA, 19 nt, artificial
  Chemically synthesized
uuucuucgguuauuuuuag

SEQ ID NO: 37711 - RNA, 19 nt, artificial
  Chemically synthesized
uuuaccuaaagacaaaaua

SEQ ID NO: 37712 - RNA, 19 nt, artificial
  Chemically synthesized
uacaaaaaaagaaacaagu

SEQ ID NO: 37713 - RNA, 19 nt, artificial
  Chemically synthesized
cuuuuuucuuuaauuacug

SEQ ID NO: 37714 - RNA, 19 nt, artificial
  Chemically synthesized
uuauacagaaauugaagga

SEQ ID NO: 37715 - RNA, 19 nt, artificial
  Chemically synthesized
uauuaugagugcuuuaaga

SEQ ID NO: 37716 - RNA, 19 nt, artificial
  Chemically synthesized
uuaccaaaugcuucucuag

SEQ ID NO: 37717 - RNA, 19 nt, artificial
  Chemically synthesized
cgauucuccaucauccucc

SEQ ID NO: 37718 - RNA, 19 nt, artificial
  Chemically synthesized
uaaugcgcuuggauagguc

SEQ ID NO: 37719 - RNA, 19 nt, artificial
  Chemically synthesized
aauuuaacaacagaugacc

SEQ ID NO: 37720 - RNA, 19 nt, artificial
  Chemically synthesized
uauauaugauaaagcuuac

SEQ ID NO: 37721 - RNA, 19 nt, artificial
  Chemically synthesized
uaaaagagugcaaauguuu

SEQ ID NO: 37722 - RNA, 19 nt, artificial
  Chemically synthesized
aaaaaaagaaacaaguuuc

SEQ ID NO: 37723 - RNA, 19 nt, artificial
  Chemically synthesized
auacacuacauuugcaauc

SEQ ID NO: 37724 - RNA, 19 nt, artificial
  Chemically synthesized
uuuuaccucuuucuuaaga

SEQ ID NO: 37725 - RNA, 19 nt, artificial
  Chemically synthesized
uucucuagacuauuguuua

SEQ ID NO: 37726 - RNA, 19 nt, artificial
  Chemically synthesized
uuuauucuacugacuucua

SEQ ID NO: 37727 - RNA, 19 nt, artificial
  Chemically synthesized
uuuagcuguuggaaaaaua

SEQ ID NO: 37728 - RNA, 19 nt, artificial
  Chemically synthesized
aagagugcaaauguuuccc

SEQ ID NO: 37729 - RNA, 19 nt, artificial
  Chemically synthesized
uaaauaauuuuagcaagug

SEQ ID NO: 37730 - RNA, 19 nt, artificial
  Chemically synthesized
augucuugaagguuaacug

SEQ ID NO: 37731 - RNA, 19 nt, artificial
  Chemically synthesized
auacaaagaaacuugcuuu

SEQ ID NO: 37732 - RNA, 19 nt, artificial
  Chemically synthesized
aucuuuuuaaaaagaucug

SEQ ID NO: 37733 - RNA, 19 nt, artificial
  Chemically synthesized
aucuguacaaaaauacucu

SEQ ID NO: 37734 - RNA, 19 nt, artificial
  Chemically synthesized
uucaacuaagaguaguuua

SEQ ID NO: 37735 - RNA, 19 nt, artificial
  Chemically synthesized
auaaggcagcccaaagguc

SEQ ID NO: 37736 - RNA, 19 nt, artificial
  Chemically synthesized
aauaauuuuagcaagugga

SEQ ID NO: 37737 - RNA, 19 nt, artificial
  Chemically synthesized
aagaaaaaagggauggaca

SEQ ID NO: 37738 - RNA, 19 nt, artificial
  Chemically synthesized
aguaauuaagauuaagguc

SEQ ID NO: 37739 - RNA, 19 nt, artificial
  Chemically synthesized
uaugauaaagcuuaccaaa

SEQ ID NO: 37740 - RNA, 19 nt, artificial
  Chemically synthesized
auuaugagugcuuuaagau

SEQ ID NO: 37741 - RNA, 19 nt, artificial
  Chemically synthesized
uuguuuucaacaaaaacaa

SEQ ID NO: 37742 - RNA, 19 nt, artificial
  Chemically synthesized
aaucuguacaaaaauacuc

SEQ ID NO: 37743 - RNA, 19 nt, artificial
  Chemically synthesized
uuucuuuaauuacugcuaa

SEQ ID NO: 37744 - RNA, 19 nt, artificial
  Chemically synthesized
uguuuacucccauaauugc

SEQ ID NO: 37745 - RNA, 19 nt, artificial
  Chemically synthesized
aaauuuggguacgaguugc

SEQ ID NO: 37746 - RNA, 19 nt, artificial
  Chemically synthesized
uuauucuacugacuucuaa

SEQ ID NO: 37747 - RNA, 19 nt, artificial
  Chemically synthesized
auucccagaacagauuuca

SEQ ID NO: 37748 - RNA, 19 nt, artificial
  Chemically synthesized
aaauagagaauauuccuca

SEQ ID NO: 37749 - RNA, 19 nt, artificial
  Chemically synthesized
aagaacauaauuuaacaac

SEQ ID NO: 37750 - RNA, 19 nt, artificial
  Chemically synthesized
aaacaaacaaaacacgaac

SEQ ID NO: 37751 - RNA, 19 nt, artificial
  Chemically synthesized
uugcaaucucucauuuaua

SEQ ID NO: 37752 - RNA, 19 nt, artificial
  Chemically synthesized
ucuuaaguuacagaaguau

SEQ ID NO: 37753 - RNA, 19 nt, artificial
  Chemically synthesized
uguuuuucucuucuuuaaa

SEQ ID NO: 37754 - RNA, 19 nt, artificial
  Chemically synthesized
uacaguuaagaacauaauu

SEQ ID NO: 37755 - RNA, 19 nt, artificial
  Chemically synthesized
uuaccuaaagacaaaauau

SEQ ID NO: 37756 - RNA, 19 nt, artificial
  Chemically synthesized
uacagaaguaucuuuuuaa

SEQ ID NO: 37757 - RNA, 19 nt, artificial
  Chemically synthesized
aaauaauuuuagcaagugg

SEQ ID NO: 37758 - RNA, 19 nt, artificial
  Chemically synthesized
caaaauaugauuuaaaugc

SEQ ID NO: 37759 - RNA, 19 nt, artificial
  Chemically synthesized
uuacaguuaagaacauaau

SEQ ID NO: 37760 - RNA, 19 nt, artificial
  Chemically synthesized
uaauuuaacaacagaugac

SEQ ID NO: 37761 - RNA, 19 nt, artificial
  Chemically synthesized
ugguguucugagaggcaca

SEQ ID NO: 37762 - RNA, 19 nt, artificial
  Chemically synthesized
aaaaauaauuacaaagucc

SEQ ID NO: 37763 - RNA, 19 nt, artificial
  Chemically synthesized
aagauuuuauucuacugac

SEQ ID NO: 37764 - RNA, 19 nt, artificial
  Chemically synthesized
cuuuuuaaaaagaucugcu

SEQ ID NO: 37765 - RNA, 19 nt, artificial
  Chemically synthesized
guacuuguaauccgggugg

SEQ ID NO: 37766 - RNA, 19 nt, artificial
  Chemically synthesized
uguucuugcuggagccguu

SEQ ID NO: 37767 - RNA, 19 nt, artificial
  Chemically synthesized
uaagagaaagcaaaucugu

SEQ ID NO: 37768 - RNA, 19 nt, artificial
  Chemically synthesized
uaacaacagaugaccauac

SEQ ID NO: 37769 - RNA, 19 nt, artificial
  Chemically synthesized
aacaacaaagaaaaaaggg

SEQ ID NO: 37770 - RNA, 19 nt, artificial
  Chemically synthesized
aaaagaucugcuuuuauac

SEQ ID NO: 37771 - RNA, 19 nt, artificial
  Chemically synthesized
aagcuagggcacacuguuc

SEQ ID NO: 37772 - RNA, 19 nt, artificial
  Chemically synthesized
aaaauaauuacaaagucca

SEQ ID NO: 37773 - RNA, 19 nt, artificial
  Chemically synthesized
auaaagcuuaccaaaugcu

SEQ ID NO: 37774 - RNA, 19 nt, artificial
  Chemically synthesized
auuguuuacucccauaauu

SEQ ID NO: 37775 - RNA, 19 nt, artificial
  Chemically synthesized
uuuuaccuaaagacaaaau

SEQ ID NO: 37776 - RNA, 19 nt, artificial
  Chemically synthesized
gaaguuuccagucaguuuc

SEQ ID NO: 37777 - RNA, 19 nt, artificial
  Chemically synthesized
aauucugguugguccucuc

SEQ ID NO: 37778 - RNA, 19 nt, artificial
  Chemically synthesized
uuugcaaucucucauuuau

SEQ ID NO: 37779 - RNA, 19 nt, artificial
  Chemically synthesized
uuacagaaguaucuuuuua

SEQ ID NO: 37780 - RNA, 19 nt, artificial
  Chemically synthesized
aaagcaauccucaaacucu

SEQ ID NO: 37781 - RNA, 19 nt, artificial
  Chemically synthesized
ugguacuuguaauccgggu

SEQ ID NO: 37782 - RNA, 19 nt, artificial
  Chemically synthesized
cuuuauuuuuuuuuaaggc

SEQ ID NO: 37783 - RNA, 19 nt, artificial
  Chemically synthesized
auacaaaaaaagaaacaag

SEQ ID NO: 37784 - RNA, 19 nt, artificial
  Chemically synthesized
aaaguccaguuucucguug

SEQ ID NO: 37785 - RNA, 19 nt, artificial
  Chemically synthesized
auaugauaaagcuuaccaa

SEQ ID NO: 37786 - RNA, 19 nt, artificial
  Chemically synthesized
aguuacagaaguaucuuuu

SEQ ID NO: 37787 - RNA, 19 nt, artificial
  Chemically synthesized
gaucacacgauucuccauc

SEQ ID NO: 37788 - RNA, 19 nt, artificial
  Chemically synthesized
acaguuaagaacauaauuu

SEQ ID NO: 37789 - RNA, 19 nt, artificial
  Chemically synthesized
uuagcuguuggaaaaauaa

SEQ ID NO: 37790 - RNA, 19 nt, artificial
  Chemically synthesized
aaagagugcaaauguuucc

SEQ ID NO: 37791 - RNA, 19 nt, artificial
  Chemically synthesized
aaguggguaaugcgcuugg

SEQ ID NO: 37792 - RNA, 19 nt, artificial
  Chemically synthesized
aacagaugaccauacccuu

SEQ ID NO: 37793 - RNA, 19 nt, artificial
  Chemically synthesized
auuuuuuuuuaaggcagcu

SEQ ID NO: 37794 - RNA, 19 nt, artificial
  Chemically synthesized
ugcuucucuagacuauugu

SEQ ID NO: 37795 - RNA, 19 nt, artificial
  Chemically synthesized
agagcauuuaauuuuaucu

SEQ ID NO: 37796 - RNA, 19 nt, artificial
  Chemically synthesized
ugguccuucuugugcugca

SEQ ID NO: 37797 - RNA, 19 nt, artificial
  Chemically synthesized
uuuucaacaaaaacaacaa

SEQ ID NO: 37798 - RNA, 19 nt, artificial
  Chemically synthesized
aagagcauuuaauuuuauc

SEQ ID NO: 37799 - RNA, 19 nt, artificial
  Chemically synthesized
aaaacaacaaagaaaaaag

SEQ ID NO: 37800 - RNA, 19 nt, artificial
  Chemically synthesized
uuaaaaagaucugcuuuua

SEQ ID NO: 37801 - RNA, 19 nt, artificial
  Chemically synthesized
uucuuaaguuacagaagua

SEQ ID NO: 37802 - RNA, 19 nt, artificial
  Chemically synthesized
cugaaguuuccagucaguu

SEQ ID NO: 37803 - RNA, 19 nt, artificial
  Chemically synthesized
aaaauaugauuuaaaugcc

SEQ ID NO: 37804 - RNA, 19 nt, artificial
  Chemically synthesized
acaaaccaaagcuuuuacc

SEQ ID NO: 37805 - RNA, 19 nt, artificial
  Chemically synthesized
aauaaggccuuuauuuuuu

SEQ ID NO: 37806 - RNA, 19 nt, artificial
  Chemically synthesized
uauucuacugacuucuaaa

SEQ ID NO: 37807 - RNA, 19 nt, artificial
  Chemically synthesized
uauacagaaauugaaggau

SEQ ID NO: 37808 - RNA, 19 nt, artificial
  Chemically synthesized
augauaaagcuuaccaaau

SEQ ID NO: 37809 - RNA, 19 nt, artificial
  Chemically synthesized
agcuuaaaugucuuuaagg

SEQ ID NO: 37810 - RNA, 19 nt, artificial
  Chemically synthesized
cagaugaccauacccuuug

SEQ ID NO: 37811 - RNA, 19 nt, artificial
  Chemically synthesized
ugaccauacccuuugagga

SEQ ID NO: 37812 - RNA, 19 nt, artificial
  Chemically synthesized
cuagacuauuguuuacucc

SEQ ID NO: 37813 - RNA, 19 nt, artificial
  Chemically synthesized
ucuuuaauuacugcuaaaa

SEQ ID NO: 37814 - RNA, 19 nt, artificial
  Chemically synthesized
ugauacacuacauuugcaa

SEQ ID NO: 37815 - RNA, 19 nt, artificial
  Chemically synthesized
uacaaagaaacuugcuuuu

SEQ ID NO: 37816 - RNA, 19 nt, artificial
  Chemically synthesized
uggaaaaauaagagcauuu

SEQ ID NO: 37817 - RNA, 19 nt, artificial
  Chemically synthesized
agaggguuuaaaaagucca

SEQ ID NO: 37818 - RNA, 19 nt, artificial
  Chemically synthesized
uaaggucugucagugggcu

SEQ ID NO: 37819 - RNA, 19 nt, artificial
  Chemically synthesized
cucgauguuggagaugacg

SEQ ID NO: 37820 - RNA, 19 nt, artificial
  Chemically synthesized
auaauuuaacaacagauga

SEQ ID NO: 37821 - RNA, 19 nt, artificial
  Chemically synthesized
aauccucaaacucucuagc

SEQ ID NO: 37822 - RNA, 19 nt, artificial
  Chemically synthesized
uaaguuacagaaguaucuu

SEQ ID NO: 37823 - RNA, 19 nt, artificial
  Chemically synthesized
aagcuuuuaccuaaagaca

SEQ ID NO: 37824 - RNA, 19 nt, artificial
  Chemically synthesized
uaaaaagaucugcuuuuau

SEQ ID NO: 37825 - RNA, 19 nt, artificial
  Chemically synthesized
uaauuuuagcaaguggaau

SEQ ID NO: 37826 - RNA, 19 nt, artificial
  Chemically synthesized
aauacaaagaaacuugcuu

SEQ ID NO: 37827 - RNA, 19 nt, artificial
  Chemically synthesized
ucuccuuacaaaauaaaua

SEQ ID NO: 37828 - RNA, 19 nt, artificial
  Chemically synthesized
uguucaacuaagaguaguu

SEQ ID NO: 37829 - RNA, 19 nt, artificial
  Chemically synthesized
ucagaagucuccagagcuu

SEQ ID NO: 37830 - RNA, 19 nt, artificial
  Chemically synthesized
ugcaaauguuucccagcag

SEQ ID NO: 37831 - RNA, 19 nt, artificial
  Chemically synthesized
aaaaaagaaacaaguuucc

SEQ ID NO: 37832 - RNA, 19 nt, artificial
  Chemically synthesized
uauuguuuacucccauaau

SEQ ID NO: 37833 - RNA, 19 nt, artificial
  Chemically synthesized
ugcugaaacauucccagaa

SEQ ID NO: 37834 - RNA, 19 nt, artificial
  Chemically synthesized
uuagcuuaaaugucuuuaa

SEQ ID NO: 37835 - RNA, 19 nt, artificial
  Chemically synthesized
ugucuugaagguuaacugc

SEQ ID NO: 37836 - RNA, 19 nt, artificial
  Chemically synthesized
guuaacugcugguguucug

SEQ ID NO: 37837 - RNA, 19 nt, artificial
  Chemically synthesized
cuguaguaggagcuggagu

SEQ ID NO: 37838 - RNA, 19 nt, artificial
  Chemically synthesized
acauaauuuaacaacagau

SEQ ID NO: 37839 - RNA, 19 nt, artificial
  Chemically synthesized
cugguacuuguaauccggg

SEQ ID NO: 37840 - RNA, 19 nt, artificial
  Chemically synthesized
uguaauccgggugguccuu

SEQ ID NO: 37841 - RNA, 19 nt, artificial
  Chemically synthesized
aguaggagcuggaguucug

SEQ ID NO: 37842 - RNA, 19 nt, artificial
  Chemically synthesized
cuucucuagacuauuguuu

SEQ ID NO: 37843 - RNA, 19 nt, artificial
  Chemically synthesized
guuaagaacauaauuuaac

SEQ ID NO: 37844 - RNA, 19 nt, artificial
  Chemically synthesized
aaauaaggccuuuauuuuu

SEQ ID NO: 37845 - RNA, 19 nt, artificial
  Chemically synthesized
aaaauaaggccuuuauuuu

SEQ ID NO: 37846 - RNA, 19 nt, artificial
  Chemically synthesized
aaaaugguaaugaaucaua

SEQ ID NO: 37847 - RNA, 19 nt, artificial
  Chemically synthesized
gugcuuuaagauuuuauuc

SEQ ID NO: 37848 - RNA, 19 nt, artificial
  Chemically synthesized
uagcuuaaaugucuuuaag

SEQ ID NO: 37849 - RNA, 19 nt, artificial
  Chemically synthesized
acacuguucaacuaagagu

SEQ ID NO: 37850 - RNA, 19 nt, artificial
  Chemically synthesized
gugaaacaaacaaaacacg

SEQ ID NO: 37851 - RNA, 19 nt, artificial
  Chemically synthesized
cauaauuuaacaacagaug

SEQ ID NO: 37852 - RNA, 19 nt, artificial
  Chemically synthesized
guaagagaaagcaaaucug

SEQ ID NO: 37853 - RNA, 19 nt, artificial
  Chemically synthesized
acgaguugccuuuagcuua

SEQ ID NO: 37854 - RNA, 19 nt, artificial
  Chemically synthesized
cagaacagauuucaucucc

SEQ ID NO: 37855 - RNA, 19 nt, artificial
  Chemically synthesized
agguguuuuucucuucuuu

SEQ ID NO: 37856 - RNA, 19 nt, artificial
  Chemically synthesized
ucuuuuuaaugcaauguau

SEQ ID NO: 37857 - RNA, 19 nt, artificial
  Chemically synthesized
cucguugacaucgaagguc

SEQ ID NO: 37858 - RNA, 19 nt, artificial
  Chemically synthesized
aaaugacucagugauacac

SEQ ID NO: 37859 - RNA, 19 nt, artificial
  Chemically synthesized
aauaauuacaaaguccaaa

SEQ ID NO: 37860 - RNA, 19 nt, artificial
  Chemically synthesized
aaggccuuuauuuuuuuuu

SEQ ID NO: 37861 - RNA, 19 nt, artificial
  Chemically synthesized
ucugcuuuuauacagaaau

SEQ ID NO: 37862 - RNA, 19 nt, artificial
  Chemically synthesized
acaaaaaggcauuuauaca

SEQ ID NO: 37863 - RNA, 19 nt, artificial
  Chemically synthesized
gauguuggagaugacgucg

SEQ ID NO: 37864 - RNA, 19 nt, artificial
  Chemically synthesized
agagaaagcaaaucuguac

SEQ ID NO: 37865 - RNA, 19 nt, artificial
  Chemically synthesized
cguuuuaaggcucaaggug

SEQ ID NO: 37866 - RNA, 19 nt, artificial
  Chemically synthesized
aggguuuaaaaaguccagu

SEQ ID NO: 37867 - RNA, 19 nt, artificial
  Chemically synthesized
aaaugguaaugaaucauac

SEQ ID NO: 37868 - RNA, 19 nt, artificial
  Chemically synthesized
acuuguaauccgggugguc

SEQ ID NO: 37869 - RNA, 19 nt, artificial
  Chemically synthesized
uuggaaaaauaagagcauu

SEQ ID NO: 37870 - RNA, 19 nt, artificial
  Chemically synthesized
aagaguaguuuagcuguug

SEQ ID NO: 37871 - RNA, 19 nt, artificial
  Chemically synthesized
ugcuugcauuguuuuugug

SEQ ID NO: 37872 - RNA, 19 nt, artificial
  Chemically synthesized
aguuucgagcuccgcuuuc

SEQ ID NO: 37873 - RNA, 19 nt, artificial
  Chemically synthesized
ucaaacucguugacaucga

SEQ ID NO: 37874 - RNA, 19 nt, artificial
  Chemically synthesized
ugguugcaagaaaagcuag

SEQ ID NO: 37875 - RNA, 19 nt, artificial
  Chemically synthesized
agaaaagcuagggcacacu

SEQ ID NO: 37876 - RNA, 19 nt, artificial
  Chemically synthesized
acaaacaaaacacgaacac

SEQ ID NO: 37877 - RNA, 19 nt, artificial
  Chemically synthesized
cuuuaagauuuuauucuac

SEQ ID NO: 37878 - RNA, 19 nt, artificial
  Chemically synthesized
uucuuuaauuacugcuaaa

SEQ ID NO: 37879 - RNA, 19 nt, artificial
  Chemically synthesized
cugguuacaguuaagaaca

SEQ ID NO: 37880 - RNA, 19 nt, artificial
  Chemically synthesized
ugcaauguauauuuauugu

SEQ ID NO: 37881 - RNA, 19 nt, artificial
  Chemically synthesized
aacauucccagaacagauu

SEQ ID NO: 37882 - RNA, 19 nt, artificial
  Chemically synthesized
acagaaauugaaggaugcc

SEQ ID NO: 37883 - RNA, 19 nt, artificial
  Chemically synthesized
gcugguacuuguaauccgg

SEQ ID NO: 37884 - RNA, 19 nt, artificial
  Chemically synthesized
uaaaugucuuuaaggaaga

SEQ ID NO: 37885 - RNA, 19 nt, artificial
  Chemically synthesized
cuuucuucgguuauuuuua

SEQ ID NO: 37886 - RNA, 19 nt, artificial
  Chemically synthesized
cuaaagacaaaauaugauu

SEQ ID NO: 37887 - RNA, 19 nt, artificial
  Chemically synthesized
gauuuuauucuacugacuu

SEQ ID NO: 37888 - RNA, 19 nt, artificial
  Chemically synthesized
ucaaaaugguaaugaauca

SEQ ID NO: 37889 - RNA, 19 nt, artificial
  Chemically synthesized
aaaucuagggugaggaaua

SEQ ID NO: 37890 - RNA, 19 nt, artificial
  Chemically synthesized
agugcuuuaagauuuuauu

SEQ ID NO: 37891 - RNA, 19 nt, artificial
  Chemically synthesized
cucauuuauacaaaaaaag

SEQ ID NO: 37892 - RNA, 19 nt, artificial
  Chemically synthesized
cucuuucuuaagacugcag

SEQ ID NO: 37893 - RNA, 19 nt, artificial
  Chemically synthesized
agggugaggaauacaaaga

SEQ ID NO: 37894 - RNA, 19 nt, artificial
  Chemically synthesized
agacuauuguuuacuccca

SEQ ID NO: 37895 - RNA, 19 nt, artificial
  Chemically synthesized
ugggagggaaacaagugaa

SEQ ID NO: 37896 - RNA, 19 nt, artificial
  Chemically synthesized
agguuucuuaaguuacaga

SEQ ID NO: 37897 - RNA, 19 nt, artificial
  Chemically synthesized
gaaaagcuagggcacacug

SEQ ID NO: 37898 - RNA, 19 nt, artificial
  Chemically synthesized
agcuccuccuuaaaucgca

SEQ ID NO: 37899 - RNA, 19 nt, artificial
  Chemically synthesized
acaauucuguuuuuaaaug

SEQ ID NO: 37900 - RNA, 19 nt, artificial
  Chemically synthesized
uguuggagaugacgucgcu

SEQ ID NO: 37901 - RNA, 19 nt, artificial
  Chemically synthesized
agcuuuuaccuaaagacaa

SEQ ID NO: 37902 - RNA, 19 nt, artificial
  Chemically synthesized
uggucgguguagucguacu

SEQ ID NO: 37903 - RNA, 19 nt, artificial
  Chemically synthesized
gucuugaugugcguucgcu

SEQ ID NO: 37904 - RNA, 19 nt, artificial
  Chemically synthesized
guuuucaacaaaaacaaca

SEQ ID NO: 37905 - RNA, 19 nt, artificial
  Chemically synthesized
aagguguuuuucucuucuu

SEQ ID NO: 37906 - RNA, 19 nt, artificial
  Chemically synthesized
aaaaagaucugcuuuuaua

SEQ ID NO: 37907 - RNA, 19 nt, artificial
  Chemically synthesized
aaacaacaaagaaaaaagg

SEQ ID NO: 37908 - RNA, 19 nt, artificial
  Chemically synthesized
guucauguaggugaaggug

SEQ ID NO: 37909 - RNA, 19 nt, artificial
  Chemically synthesized
auaauuuuagcaaguggaa

SEQ ID NO: 37910 - RNA, 19 nt, artificial
  Chemically synthesized
agcaaguggaaugucuuga

SEQ ID NO: 37911 - RNA, 19 nt, artificial
  Chemically synthesized
cagaagucuccagagcuug

SEQ ID NO: 37912 - RNA, 19 nt, artificial
  Chemically synthesized
caaguuuccaguuuguuuu

SEQ ID NO: 37913 - RNA, 19 nt, artificial
  Chemically synthesized
ucucuagacuauuguuuac

SEQ ID NO: 37914 - RNA, 19 nt, artificial
  Chemically synthesized
gguacuuguaauccgggug

SEQ ID NO: 37915 - RNA, 19 nt, artificial
  Chemically synthesized
augagugcuuuaagauuuu

SEQ ID NO: 37916 - RNA, 19 nt, artificial
  Chemically synthesized
aaggcauuuauacaaaucu

SEQ ID NO: 37917 - RNA, 19 nt, artificial
  Chemically synthesized
aaacacugcaaaugacuca

SEQ ID NO: 37918 - RNA, 19 nt, artificial
  Chemically synthesized
aaccaaagcuuuuaccuaa

SEQ ID NO: 37919 - RNA, 19 nt, artificial
  Chemically synthesized
gaaauuuggguacgaguug

SEQ ID NO: 37920 - RNA, 19 nt, artificial
  Chemically synthesized
gauuaaggucugucagugg

SEQ ID NO: 37921 - RNA, 19 nt, artificial
  Chemically synthesized
uaagaguaguuuagcuguu

SEQ ID NO: 37922 - RNA, 19 nt, artificial
  Chemically synthesized
ccuuuauuuuuuuuuaagg

SEQ ID NO: 37923 - RNA, 19 nt, artificial
  Chemically synthesized
uccaacaaccuauuuuaaa

SEQ ID NO: 37924 - RNA, 19 nt, artificial
  Chemically synthesized
guuacaguuaagaacauaa

SEQ ID NO: 37925 - RNA, 19 nt, artificial
  Chemically synthesized
aggcagagagauuuagcac

SEQ ID NO: 37926 - RNA, 19 nt, artificial
  Chemically synthesized
cucacagaggacuuuuuuc

SEQ ID NO: 37927 - RNA, 19 nt, artificial
  Chemically synthesized
acauuugcaaucucucauu

SEQ ID NO: 37928 - RNA, 19 nt, artificial
  Chemically synthesized
accuaaagacaaaauauga

SEQ ID NO: 37929 - RNA, 19 nt, artificial
  Chemically synthesized
cacaaguggguaaugcgcu

SEQ ID NO: 37930 - RNA, 19 nt, artificial
  Chemically synthesized
cuuuuauacagaaauugaa

SEQ ID NO: 37931 - RNA, 19 nt, artificial
  Chemically synthesized
agauuuuauucuacugacu

SEQ ID NO: 37932 - RNA, 19 nt, artificial
  Chemically synthesized
cucugguugcaagaaaagc

SEQ ID NO: 37933 - RNA, 19 nt, artificial
  Chemically synthesized
aggaaagcuccaacaaccu

SEQ ID NO: 37934 - RNA, 19 nt, artificial
  Chemically synthesized
ggcugguacuuguaauccg

SEQ ID NO: 37935 - RNA, 19 nt, artificial
  Chemically synthesized
aacaacagaugaccauacc

SEQ ID NO: 37936 - RNA, 19 nt, artificial
  Chemically synthesized
aacaaguuuccaguuuguu

SEQ ID NO: 37937 - RNA, 19 nt, artificial
  Chemically synthesized
aaaaguccaguuucucguu

SEQ ID NO: 37938 - RNA, 19 nt, artificial
  Chemically synthesized
agguuaacugcugguguuc

SEQ ID NO: 37939 - RNA, 19 nt, artificial
  Chemically synthesized
aacaaacaaaacacgaaca

SEQ ID NO: 37940 - RNA, 19 nt, artificial
  Chemically synthesized
aaaaagaaacaaguuucca

SEQ ID NO: 37941 - RNA, 19 nt, artificial
  Chemically synthesized
aagugaaacaaacaaaaca

SEQ ID NO: 37942 - RNA, 19 nt, artificial
  Chemically synthesized
gaauucugguugguccucu

SEQ ID NO: 37943 - RNA, 19 nt, artificial
  Chemically synthesized
guacgaguugccuuuagcu

SEQ ID NO: 37944 - RNA, 19 nt, artificial
  Chemically synthesized
agaaacuugcuuuuaauaa

SEQ ID NO: 37945 - RNA, 19 nt, artificial
  Chemically synthesized
uaaggccuuuauuuuuuuu

SEQ ID NO: 37946 - RNA, 19 nt, artificial
  Chemically synthesized
guuucuuaaguuacagaag

SEQ ID NO: 37947 - RNA, 19 nt, artificial
  Chemically synthesized
guaaguuucacggagagaa

SEQ ID NO: 37948 - RNA, 19 nt, artificial
  Chemically synthesized
caguaauuaagauuaaggu

SEQ ID NO: 37949 - RNA, 19 nt, artificial
  Chemically synthesized
acaacaaagaaaaaaggga

SEQ ID NO: 37950 - RNA, 19 nt, artificial
  Chemically synthesized
uacuuguaauccggguggu

SEQ ID NO: 37951 - RNA, 19 nt, artificial
  Chemically synthesized
cacugaucacacgauucuc

SEQ ID NO: 37952 - RNA, 19 nt, artificial
  Chemically synthesized
aacaagugaaacaaacaaa

SEQ ID NO: 37953 - RNA, 19 nt, artificial
  Chemically synthesized
agccugaggaauuaagcaa

SEQ ID NO: 37954 - RNA, 19 nt, artificial
  Chemically synthesized
aacuaagaguaguuuagcu

SEQ ID NO: 37955 - RNA, 19 nt, artificial
  Chemically synthesized
caaaauaaggccuuuauuu

SEQ ID NO: 37956 - RNA, 19 nt, artificial
  Chemically synthesized
augcgcuuggauaggucau

SEQ ID NO: 37957 - RNA, 19 nt, artificial
  Chemically synthesized
cuguuggaaaaauaagagc

SEQ ID NO: 37958 - RNA, 19 nt, artificial
  Chemically synthesized
guccaguuucucguugauu

SEQ ID NO: 37959 - RNA, 19 nt, artificial
  Chemically synthesized
auaaggccuuuauuuuuuu

SEQ ID NO: 37960 - RNA, 19 nt, artificial
  Chemically synthesized
ucauguaggugaaggugga

SEQ ID NO: 37961 - RNA, 19 nt, artificial
  Chemically synthesized
cagguuucuuaaguuacag

SEQ ID NO: 37962 - RNA, 19 nt, artificial
  Chemically synthesized
guugcaagaaaagcuaggg

SEQ ID NO: 37963 - RNA, 19 nt, artificial
  Chemically synthesized
acugaaguuuccagucagu

SEQ ID NO: 37964 - RNA, 19 nt, artificial
  Chemically synthesized
gugucuuggaaauuugggu

SEQ ID NO: 37965 - RNA, 19 nt, artificial
  Chemically synthesized
ggcauuuauacaaaucuag

SEQ ID NO: 37966 - RNA, 19 nt, artificial
  Chemically synthesized
ugcagugaacaagcaaagg

SEQ ID NO: 37967 - RNA, 19 nt, artificial
  Chemically synthesized
aagccugaggaauuaagca

SEQ ID NO: 37968 - RNA, 19 nt, artificial
  Chemically synthesized
cucguucagaagucuccag

SEQ ID NO: 37969 - RNA, 19 nt, artificial
  Chemically synthesized
aaaccaaagcuuuuaccua

SEQ ID NO: 37970 - RNA, 19 nt, artificial
  Chemically synthesized
cacugaaguuuccagucag

SEQ ID NO: 37971 - RNA, 19 nt, artificial
  Chemically synthesized
acaugcuugcauuguuuuu

SEQ ID NO: 37972 - RNA, 19 nt, artificial
  Chemically synthesized
uaauuacaaaguccaaaca

SEQ ID NO: 37973 - RNA, 19 nt, artificial
  Chemically synthesized
aaguuacagaaguaucuuu

SEQ ID NO: 37974 - RNA, 19 nt, artificial
  Chemically synthesized
uacucugguugcaagaaaa

SEQ ID NO: 37975 - RNA, 19 nt, artificial
  Chemically synthesized
cuaaaacuguuaauauauc

SEQ ID NO: 37976 - RNA, 19 nt, artificial
  Chemically synthesized
acagaggacuuuuuucuuu

SEQ ID NO: 37977 - RNA, 19 nt, artificial
  Chemically synthesized
uuucaacaaaaacaacaaa

SEQ ID NO: 37978 - RNA, 19 nt, artificial
  Chemically synthesized
aacaggcagagagauuuag

SEQ ID NO: 37979 - RNA, 19 nt, artificial
  Chemically synthesized
ugcaaaugacucagugaua

SEQ ID NO: 37980 - RNA, 19 nt, artificial
  Chemically synthesized
acuucuaaaacuguuaaua

SEQ ID NO: 37981 - RNA, 19 nt, artificial
  Chemically synthesized
guaucuuuuuaaaaagauc

SEQ ID NO: 37982 - RNA, 19 nt, artificial
  Chemically synthesized
cggcugguacuuguaaucc

SEQ ID NO: 37983 - RNA, 19 nt, artificial
  Chemically synthesized
ucucucauuuauacaaaaa

SEQ ID NO: 37984 - RNA, 19 nt, artificial
  Chemically synthesized
agaacauaauuuaacaaca

SEQ ID NO: 37985 - RNA, 19 nt, artificial
  Chemically synthesized
cugggagggaaacaaguga

SEQ ID NO: 37986 - RNA, 19 nt, artificial
  Chemically synthesized
agggauggacaaaaaggca

SEQ ID NO: 37987 - RNA, 19 nt, artificial
  Chemically synthesized
auuugcaaucucucauuua

SEQ ID NO: 37988 - RNA, 19 nt, artificial
  Chemically synthesized
cugguugcaagaaaagcua

SEQ ID NO: 37989 - RNA, 19 nt, artificial
  Chemically synthesized
aauagagaauauuccucac

SEQ ID NO: 37990 - RNA, 19 nt, artificial
  Chemically synthesized
cagcuccuccuuaaaucgc

SEQ ID NO: 37991 - RNA, 19 nt, artificial
  Chemically synthesized
aguaguuuagcuguuggaa

SEQ ID NO: 37992 - RNA, 19 nt, artificial
  Chemically synthesized
aacaaaaacaacaaagaaa

SEQ ID NO: 37993 - RNA, 19 nt, artificial
  Chemically synthesized
aaaggcaggaggaaaugca

SEQ ID NO: 37994 - RNA, 19 nt, artificial
  Chemically synthesized
aacauaauuuaacaacaga

SEQ ID NO: 37995 - RNA, 19 nt, artificial
  Chemically synthesized
gagaauauuccucacagag

SEQ ID NO: 37996 - RNA, 19 nt, artificial
  Chemically synthesized
guuuguuuucaacaaaaac

SEQ ID NO: 37997 - RNA, 19 nt, artificial
  Chemically synthesized
aacugcugguguucugaga

SEQ ID NO: 37998 - RNA, 19 nt, artificial
  Chemically synthesized
cuucucgcucucguucaga

SEQ ID NO: 37999 - RNA, 19 nt, artificial
  Chemically synthesized
gugaacaagcaaaggcagg

SEQ ID NO: 38000 - RNA, 19 nt, artificial
  Chemically synthesized
caaaccaaagcuuuuaccu

SEQ ID NO: 38001 - RNA, 19 nt, artificial
  Chemically synthesized
aaacaagugaaacaaacaa

SEQ ID NO: 38002 - RNA, 19 nt, artificial
  Chemically synthesized
agagugcaaauguuuccca

SEQ ID NO: 38003 - RNA, 19 nt, artificial
  Chemically synthesized
uguuuucaacaaaaacaac

SEQ ID NO: 38004 - RNA, 19 nt, artificial
  Chemically synthesized
acagcaguaauuaagauua

SEQ ID NO: 38005 - RNA, 19 nt, artificial
  Chemically synthesized
cuuaaaugucuuuaaggaa

SEQ ID NO: 38006 - RNA, 19 nt, artificial
  Chemically synthesized
ugcacuaaaagagugcaaa

SEQ ID NO: 38007 - RNA, 19 nt, artificial
  Chemically synthesized
gguguuuuucucuucuuua

SEQ ID NO: 38008 - RNA, 19 nt, artificial
  Chemically synthesized
gcucucguucagaagucuc

SEQ ID NO: 38009 - RNA, 19 nt, artificial
  Chemically synthesized
acaaccuauuuuaaagaag

SEQ ID NO: 38010 - RNA, 19 nt, artificial
  Chemically synthesized
caauccucaaacucucuag

SEQ ID NO: 38011 - RNA, 19 nt, artificial
  Chemically synthesized
gauaaagcuuaccaaaugc

SEQ ID NO: 38012 - RNA, 19 nt, artificial
  Chemically synthesized
cuggucaaacucguugaca

SEQ ID NO: 38013 - RNA, 19 nt, artificial
  Chemically synthesized
uuacucccauaauugcaaa

SEQ ID NO: 38014 - RNA, 19 nt, artificial
  Chemically synthesized
cuuuuuaaugcaauguaua

SEQ ID NO: 38015 - RNA, 19 nt, artificial
  Chemically synthesized
guucagaagucuccagagc

SEQ ID NO: 38016 - RNA, 19 nt, artificial
  Chemically synthesized
aaguccaguuucucguuga

SEQ ID NO: 38017 - RNA, 19 nt, artificial
  Chemically synthesized
cuuuaauuacugcuaaaaa

SEQ ID NO: 38018 - RNA, 19 nt, artificial
  Chemically synthesized
ccuuuuaccucuuucuuaa

SEQ ID NO: 38019 - RNA, 19 nt, artificial
  Chemically synthesized
ugcuugccuuuuaccucuu

SEQ ID NO: 38020 - RNA, 19 nt, artificial
  Chemically synthesized
caaguggguaaugcgcuug

SEQ ID NO: 38021 - RNA, 19 nt, artificial
  Chemically synthesized
cugacuucuaaaacuguua

SEQ ID NO: 38022 - RNA, 19 nt, artificial
  Chemically synthesized
ugacuucuaaaacuguuaa

SEQ ID NO: 38023 - RNA, 19 nt, artificial
  Chemically synthesized
gagauuuagcacacugauc

SEQ ID NO: 38024 - RNA, 19 nt, artificial
  Chemically synthesized
agcaauccucaaacucucu

SEQ ID NO: 38025 - RNA, 19 nt, artificial
  Chemically synthesized
aauccgggugguccuucuu

SEQ ID NO: 38026 - RNA, 19 nt, artificial
  Chemically synthesized
augacucagugauacacua

SEQ ID NO: 38027 - RNA, 19 nt, artificial
  Chemically synthesized
cguucuucaccgacuuccu

SEQ ID NO: 38028 - RNA, 19 nt, artificial
  Chemically synthesized
acuccaagagaagauguag

SEQ ID NO: 38029 - RNA, 19 nt, artificial
  Chemically synthesized
ggaaaaagagcaaaagugg

SEQ ID NO: 38030 - RNA, 19 nt, artificial
  Chemically synthesized
ucaacaaaaacaacaaaga

SEQ ID NO: 38031 - RNA, 19 nt, artificial
  Chemically synthesized
aaucuagggugaggaauac

SEQ ID NO: 38032 - RNA, 19 nt, artificial
  Chemically synthesized
cuagggugaggaauacaaa

SEQ ID NO: 38033 - RNA, 19 nt, artificial
  Chemically synthesized
cuuaccaaaugcuucucua

SEQ ID NO: 38034 - RNA, 19 nt, artificial
  Chemically synthesized
acaaguggguaaugcgcuu

SEQ ID NO: 38035 - RNA, 19 nt, artificial
  Chemically synthesized
caaagccugaggaauuaag

SEQ ID NO: 38036 - RNA, 19 nt, artificial
  Chemically synthesized
acauucccagaacagauuu

SEQ ID NO: 38037 - RNA, 19 nt, artificial
  Chemically synthesized
cuuuuaccucuuucuuaag

SEQ ID NO: 38038 - RNA, 19 nt, artificial
  Chemically synthesized
aaauguuaauacaacagga

SEQ ID NO: 38039 - RNA, 19 nt, artificial
  Chemically synthesized
cagucguagccuuugagca

SEQ ID NO: 38040 - RNA, 19 nt, artificial
  Chemically synthesized
aaguuuccaguuuguuuuc

SEQ ID NO: 38041 - RNA, 19 nt, artificial
  Chemically synthesized
cucacuccaagagaagaug

SEQ ID NO: 38042 - RNA, 19 nt, artificial
  Chemically synthesized
auacucugguugcaagaaa

SEQ ID NO: 38043 - RNA, 19 nt, artificial
  Chemically synthesized
aagaaacuugcuuuuaaua

SEQ ID NO: 38044 - RNA, 19 nt, artificial
  Chemically synthesized
aaaggcauuuauacaaauc

SEQ ID NO: 38045 - RNA, 19 nt, artificial
  Chemically synthesized
caaacaggcagagagauuu

SEQ ID NO: 38046 - RNA, 19 nt, artificial
  Chemically synthesized
uccucacagaggacuuuuu

SEQ ID NO: 38047 - RNA, 19 nt, artificial
  Chemically synthesized
aaagaucugcuuuuauaca

SEQ ID NO: 38048 - RNA, 19 nt, artificial
  Chemically synthesized
cucagugauacacuacauu

SEQ ID NO: 38049 - RNA, 19 nt, artificial
  Chemically synthesized
accuauuuuaaagaaggua

SEQ ID NO: 38050 - RNA, 19 nt, artificial
  Chemically synthesized
cauauuaugagugcuuuaa

SEQ ID NO: 38051 - RNA, 19 nt, artificial
  Chemically synthesized
guugauuucgcugcuccau

SEQ ID NO: 38052 - RNA, 19 nt, artificial
  Chemically synthesized
acaaaaacaacaaagaaaa

SEQ ID NO: 38053 - RNA, 19 nt, artificial
  Chemically synthesized
gucgguguagucguacugu

SEQ ID NO: 38054 - RNA, 19 nt, artificial
  Chemically synthesized
aaccucuccuuacaaaaua

SEQ ID NO: 38055 - RNA, 19 nt, artificial
  Chemically synthesized
ggguucauguaggugaagg

SEQ ID NO: 38056 - RNA, 19 nt, artificial
  Chemically synthesized
gccuuuuaccucuuucuua

SEQ ID NO: 38057 - RNA, 19 nt, artificial
  Chemically synthesized
acugcagugaacaagcaaa

SEQ ID NO: 38058 - RNA, 19 nt, artificial
  Chemically synthesized
aaugguaaugaaucauaca

SEQ ID NO: 38059 - RNA, 19 nt, artificial
  Chemically synthesized
cacuacauuugcaaucucu

SEQ ID NO: 38060 - RNA, 19 nt, artificial
  Chemically synthesized
caaaucuguacaaaaauac

SEQ ID NO: 38061 - RNA, 19 nt, artificial
  Chemically synthesized
gaaaaagagcaaaaguggg

SEQ ID NO: 38062 - RNA, 19 nt, artificial
  Chemically synthesized
agaaaaaagggauggacaa

SEQ ID NO: 38063 - RNA, 19 nt, artificial
  Chemically synthesized
uggguacgaguugccuuua

SEQ ID NO: 38064 - RNA, 19 nt, artificial
  Chemically synthesized
ccuauuuuaaagaagguaa

SEQ ID NO: 38065 - RNA, 19 nt, artificial
  Chemically synthesized
gaaaacacugcaaaugacu

SEQ ID NO: 38066 - RNA, 19 nt, artificial
  Chemically synthesized
agagaacaaaagguuuggg

SEQ ID NO: 38067 - RNA, 19 nt, artificial
  Chemically synthesized
cugcagugaacaagcaaag

SEQ ID NO: 38068 - RNA, 19 nt, artificial
  Chemically synthesized
acaagugaaacaaacaaaa

SEQ ID NO: 38069 - RNA, 19 nt, artificial
  Chemically synthesized
aaguuucacggagagaaca

SEQ ID NO: 38070 - RNA, 19 nt, artificial
  Chemically synthesized
cagugauacacuacauuug

SEQ ID NO: 38071 - RNA, 19 nt, artificial
  Chemically synthesized
caccguuuuaaggcucaag

SEQ ID NO: 38072 - RNA, 19 nt, artificial
  Chemically synthesized
ggaaauuuggguacgaguu

SEQ ID NO: 38073 - RNA, 19 nt, artificial
  Chemically synthesized
ggcagcuccuccuuaaauc

SEQ ID NO: 38074 - RNA, 19 nt, artificial
  Chemically synthesized
gacaaaaaggcauuuauac

SEQ ID NO: 38075 - RNA, 19 nt, artificial
  Chemically synthesized
acggagagaacaaaagguu

SEQ ID NO: 38076 - RNA, 19 nt, artificial
  Chemically synthesized
aggacuuuuuucuuuaauu

SEQ ID NO: 38077 - RNA, 19 nt, artificial
  Chemically synthesized
augcacuaaaagagugcaa

SEQ ID NO: 38078 - RNA, 19 nt, artificial
  Chemically synthesized
gaggguuuaaaaaguccag

SEQ ID NO: 38079 - RNA, 19 nt, artificial
  Chemically synthesized
aguuuccagucaguuucga

SEQ ID NO: 38080 - RNA, 19 nt, artificial
  Chemically synthesized
guccucucuuucuucgguu

SEQ ID NO: 38081 - RNA, 19 nt, artificial
  Chemically synthesized
aaggcaggaggaaaugcac

SEQ ID NO: 38082 - RNA, 19 nt, artificial
  Chemically synthesized
ugaucacacgauucuccau

SEQ ID NO: 38083 - RNA, 19 nt, artificial
  Chemically synthesized
gguuucuuaaguuacagaa

SEQ ID NO: 38084 - RNA, 19 nt, artificial
  Chemically synthesized
gcugcugaaacauucccag

SEQ ID NO: 38085 - RNA, 19 nt, artificial
  Chemically synthesized
ucucgauguuggagaugac

SEQ ID NO: 38086 - RNA, 19 nt, artificial
  Chemically synthesized
cugcuaaaaaaauaauuac

SEQ ID NO: 38087 - RNA, 19 nt, artificial
  Chemically synthesized
gucuuggaaauuuggguac

SEQ ID NO: 38088 - RNA, 19 nt, artificial
  Chemically synthesized
cacuguucaacuaagagua

SEQ ID NO: 38089 - RNA, 19 nt, artificial
  Chemically synthesized
caaaucuagggugaggaau

SEQ ID NO: 38090 - RNA, 19 nt, artificial
  Chemically synthesized
aauauuccucacagaggac

SEQ ID NO: 38091 - RNA, 19 nt, artificial
  Chemically synthesized
aaagaaacuugcuuuuaau

SEQ ID NO: 38092 - RNA, 19 nt, artificial
  Chemically synthesized
ggcugcugaaacauuccca

SEQ ID NO: 38093 - RNA, 19 nt, artificial
  Chemically synthesized
cucguugauuucgcugcuc

SEQ ID NO: 38094 - RNA, 19 nt, artificial
  Chemically synthesized
gauuucaucuccuuugcuu

SEQ ID NO: 38095 - RNA, 19 nt, artificial
  Chemically synthesized
ggguccaggagauucauac

SEQ ID NO: 38096 - RNA, 19 nt, artificial
  Chemically synthesized
cuugcucugaagaggguuu

SEQ ID NO: 38097 - RNA, 19 nt, artificial
  Chemically synthesized
auucuacugacuucuaaaa

SEQ ID NO: 38098 - RNA, 19 nt, artificial
  Chemically synthesized
aaucucucauuuauacaaa

SEQ ID NO: 38099 - RNA, 19 nt, artificial
  Chemically synthesized
caaaaaaagaaacaaguuu

SEQ ID NO: 38100 - RNA, 19 nt, artificial
  Chemically synthesized
aucgcaaagccugaggaau

SEQ ID NO: 38101 - RNA, 19 nt, artificial
  Chemically synthesized
aggcaucugccuuccacau

SEQ ID NO: 38102 - RNA, 19 nt, artificial
  Chemically synthesized
gccuuuagcuuaaaugucu

SEQ ID NO: 38103 - RNA, 19 nt, artificial
  Chemically synthesized
auggacaaaaaggcauuua

SEQ ID NO: 38104 - RNA, 19 nt, artificial
  Chemically synthesized
gcagcuccuccuuaaaucg

SEQ ID NO: 38105 - RNA, 19 nt, artificial
  Chemically synthesized
gguugcaagaaaagcuagg

SEQ ID NO: 38106 - RNA, 19 nt, artificial
  Chemically synthesized
guuuuucucuucuuuaaaa

SEQ ID NO: 38107 - RNA, 19 nt, artificial
  Chemically synthesized
agagauuuagcacacugau

SEQ ID NO: 38108 - RNA, 19 nt, artificial
  Chemically synthesized
aauuaagauuaaggucugu

SEQ ID NO: 38109 - RNA, 19 nt, artificial
  Chemically synthesized
gagugcuuuaagauuuuau

SEQ ID NO: 38110 - RNA, 19 nt, artificial
  Chemically synthesized
ucagcugcuccgucuugau

SEQ ID NO: 38111 - RNA, 19 nt, artificial
  Chemically synthesized
cucgcucucguucagaagu

SEQ ID NO: 38112 - RNA, 19 nt, artificial
  Chemically synthesized
guaguuuagcuguuggaaa

SEQ ID NO: 38113 - RNA, 19 nt, artificial
  Chemically synthesized
gacucagugauacacuaca

SEQ ID NO: 38114 - RNA, 19 nt, artificial
  Chemically synthesized
caaaaaggcauuuauacaa

SEQ ID NO: 38115 - RNA, 19 nt, artificial
  Chemically synthesized
agcuuaccaaaugcuucuc

SEQ ID NO: 38116 - RNA, 19 nt, artificial
  Chemically synthesized
guguagucguacugugagc

SEQ ID NO: 38117 - RNA, 19 nt, artificial
  Chemically synthesized
guguuuuucucuucuuuaa

SEQ ID NO: 38118 - RNA, 19 nt, artificial
  Chemically synthesized
ccaguuucucguugauuuc

SEQ ID NO: 38119 - RNA, 19 nt, artificial
  Chemically synthesized
cacacugaucacacgauuc

SEQ ID NO: 38120 - RNA, 19 nt, artificial
  Chemically synthesized
acucugguugcaagaaaag

SEQ ID NO: 38121 - RNA, 19 nt, artificial
  Chemically synthesized
cacacuguucaacuaagag

SEQ ID NO: 38122 - RNA, 19 nt, artificial
  Chemically synthesized
gcaaauguuucccagcagc

SEQ ID NO: 38123 - RNA, 19 nt, artificial
  Chemically synthesized
cucgcucuccuucuucaga

SEQ ID NO: 38124 - RNA, 19 nt, artificial
  Chemically synthesized
cagcagcaccguuuuaagg

SEQ ID NO: 38125 - RNA, 19 nt, artificial
  Chemically synthesized
ugagugcuuuaagauuuua

SEQ ID NO: 38126 - RNA, 19 nt, artificial
  Chemically synthesized
agugaacaagcaaaggcag

SEQ ID NO: 38127 - RNA, 19 nt, artificial
  Chemically synthesized
cacaaaccaaagcuuuuac

SEQ ID NO: 38128 - RNA, 19 nt, artificial
  Chemically synthesized
cugaaacauucccagaaca

SEQ ID NO: 38129 - RNA, 19 nt, artificial
  Chemically synthesized
uccucucuuucuucgguua

SEQ ID NO: 38130 - RNA, 19 nt, artificial
  Chemically synthesized
ucccauaauugcaaaauaa

SEQ ID NO: 38131 - RNA, 19 nt, artificial
  Chemically synthesized
aggaauuaagcaaaguuaa

SEQ ID NO: 38132 - RNA, 19 nt, artificial
  Chemically synthesized
cacuaaaagagugcaaaug

SEQ ID NO: 38133 - RNA, 21 nt, artificial
  Chemically synthesized
cauccuucaauuucuguauaa

SEQ ID NO: 38134 - RNA, 21 nt, artificial
  Chemically synthesized
gucaguagaauaaaaucuuaa

SEQ ID NO: 38135 - RNA, 21 nt, artificial
  Chemically synthesized
gauacuucuguaacuuaagaa

SEQ ID NO: 38136 - RNA, 21 nt, artificial
  Chemically synthesized
aaggagagguuuuaauuaaaa

SEQ ID NO: 38137 - RNA, 21 nt, artificial
  Chemically synthesized
uaaggagagguuuuaauuaaa

SEQ ID NO: 38138 - RNA, 21 nt, artificial
  Chemically synthesized
ccuguuguauuaacauuuaaa

SEQ ID NO: 38139 - RNA, 21 nt, artificial
  Chemically synthesized
ugguaagcuuuaucauauaua

SEQ ID NO: 38140 - RNA, 21 nt, artificial
  Chemically synthesized
gaggaauauucucuauuuuaa

SEQ ID NO: 38141 - RNA, 21 nt, artificial
  Chemically synthesized
ggagagguuuuaauuaaaaca

SEQ ID NO: 38142 - RNA, 21 nt, artificial
  Chemically synthesized
ugaggaauauucucuauuuua

SEQ ID NO: 38143 - RNA, 21 nt, artificial
  Chemically synthesized
guaaggagagguuuuaauuaa

SEQ ID NO: 38144 - RNA, 21 nt, artificial
  Chemically synthesized
caauuaugggaguaaacaaua

SEQ ID NO: 38145 - RNA, 21 nt, artificial
  Chemically synthesized
gagagguuuuaauuaaaacaa

SEQ ID NO: 38146 - RNA, 21 nt, artificial
  Chemically synthesized
cuuaaagacauuuaagcuaaa

SEQ ID NO: 38147 - RNA, 21 nt, artificial
  Chemically synthesized
gcugccuuaaaaaaaaauaaa

SEQ ID NO: 38148 - RNA, 21 nt, artificial
  Chemically synthesized
ccaauuuuaccuucuuuaaaa

SEQ ID NO: 38149 - RNA, 21 nt, artificial
  Chemically synthesized
aaaucuuaaagcacucauaau

SEQ ID NO: 38150 - RNA, 21 nt, artificial
  Chemically synthesized
uccuguuguauuaacauuuaa

SEQ ID NO: 38151 - RNA, 21 nt, artificial
  Chemically synthesized
ggucaucuguuguuaaauuau

SEQ ID NO: 38152 - RNA, 21 nt, artificial
  Chemically synthesized
cuuuguuguuuuuguugaaaa

SEQ ID NO: 38153 - RNA, 21 nt, artificial
  Chemically synthesized
gcagaucuuuuuaaaaagaua

SEQ ID NO: 38154 - RNA, 21 nt, artificial
  Chemically synthesized
cauauuuugucuuuagguaaa

SEQ ID NO: 38155 - RNA, 21 nt, artificial
  Chemically synthesized
aaaagauacuucuguaacuua

SEQ ID NO: 38156 - RNA, 21 nt, artificial
  Chemically synthesized
uccuucaauuucuguauaaaa

SEQ ID NO: 38157 - RNA, 21 nt, artificial
  Chemically synthesized
aaaugagagauugcaaaugua

SEQ ID NO: 38158 - RNA, 21 nt, artificial
  Chemically synthesized
guuguuuuuguugaaaacaaa

SEQ ID NO: 38159 - RNA, 21 nt, artificial
  Chemically synthesized
cuaaaaauaaccgaagaaaga

SEQ ID NO: 38160 - RNA, 21 nt, artificial
  Chemically synthesized
agcagaucuuuuuaaaaagau

SEQ ID NO: 38161 - RNA, 21 nt, artificial
  Chemically synthesized
uggucaucuguuguuaaauua

SEQ ID NO: 38162 - RNA, 21 nt, artificial
  Chemically synthesized
uuugguaagcuuuaucauaua

SEQ ID NO: 38163 - RNA, 21 nt, artificial
  Chemically synthesized
ccuuaaagacauuuaagcuaa

SEQ ID NO: 38164 - RNA, 21 nt, artificial
  Chemically synthesized
cuuauuuuuccaacagcuaaa

SEQ ID NO: 38165 - RNA, 21 nt, artificial
  Chemically synthesized
gagcugccuuaaaaaaaaaua

SEQ ID NO: 38166 - RNA, 21 nt, artificial
  Chemically synthesized
uuagaagucaguagaauaaaa

SEQ ID NO: 38167 - RNA, 21 nt, artificial
  Chemically synthesized
gacagaccuuaaucuuaauua

SEQ ID NO: 38168 - RNA, 21 nt, artificial
  Chemically synthesized
cuguuuggacuuuguaauuau

SEQ ID NO: 38169 - RNA, 21 nt, artificial
  Chemically synthesized
aaagauacuucuguaacuuaa

SEQ ID NO: 38170 - RNA, 21 nt, artificial
  Chemically synthesized
cuagcuuuucuugcaaccaga

SEQ ID NO: 38171 - RNA, 21 nt, artificial
  Chemically synthesized
guauaaaugagagauugcaaa

SEQ ID NO: 38172 - RNA, 21 nt, artificial
  Chemically synthesized
ucauauuuugucuuuagguaa

SEQ ID NO: 38173 - RNA, 21 nt, artificial
  Chemically synthesized
gggauuuauacauauuuuuag

SEQ ID NO: 38174 - RNA, 21 nt, artificial
  Chemically synthesized
aaucuuaaagcacucauaaua

SEQ ID NO: 38175 - RNA, 21 nt, artificial
  Chemically synthesized
cauuugguaagcuuuaucaua

SEQ ID NO: 38176 - RNA, 21 nt, artificial
  Chemically synthesized
guuuuagaagucaguagaaua

SEQ ID NO: 38177 - RNA, 21 nt, artificial
  Chemically synthesized
auccuaaaaauaaccgaagaa

SEQ ID NO: 38178 - RNA, 21 nt, artificial
  Chemically synthesized
uguuguuuuuguugaaaacaa

SEQ ID NO: 38179 - RNA, 21 nt, artificial
  Chemically synthesized
cauuccacuugcuaaaauuau

SEQ ID NO: 38180 - RNA, 21 nt, artificial
  Chemically synthesized
cagaccuuaaucuuaauuacu

SEQ ID NO: 38181 - RNA, 21 nt, artificial
  Chemically synthesized
ucacccuagauuuguauaaau

SEQ ID NO: 38182 - RNA, 21 nt, artificial
  Chemically synthesized
aguaaacaauagucuagagaa

SEQ ID NO: 38183 - RNA, 21 nt, artificial
  Chemically synthesized
aggagagguuuuaauuaaaac

SEQ ID NO: 38184 - RNA, 21 nt, artificial
  Chemically synthesized
agcugccuuaaaaaaaaauaa

SEQ ID NO: 38185 - RNA, 21 nt, artificial
  Chemically synthesized
ccacuugcuaaaauuauuuau

SEQ ID NO: 38186 - RNA, 21 nt, artificial
  Chemically synthesized
ccuccugccuuugcuuguuca

SEQ ID NO: 38187 - RNA, 21 nt, artificial
  Chemically synthesized
uaugauucauuaccauuuuga

SEQ ID NO: 38188 - RNA, 21 nt, artificial
  Chemically synthesized
acuggaaacuuguuucuuuuu

SEQ ID NO: 38189 - RNA, 21 nt, artificial
  Chemically synthesized
guauaaaagcagaucuuuuua

SEQ ID NO: 38190 - RNA, 21 nt, artificial
  Chemically synthesized
aagcagaucuuuuuaaaaaga

SEQ ID NO: 38191 - RNA, 21 nt, artificial
  Chemically synthesized
uagaagucaguagaauaaaau

SEQ ID NO: 38192 - RNA, 21 nt, artificial
  Chemically synthesized
uguaaggagagguuuuaauua

SEQ ID NO: 38193 - RNA, 21 nt, artificial
  Chemically synthesized
ggcauuuaaaucauauuuugu

SEQ ID NO: 38194 - RNA, 21 nt, artificial
  Chemically synthesized
agucuuaagaaagagguaaaa

SEQ ID NO: 38195 - RNA, 21 nt, artificial
  Chemically synthesized
aaaaucuuaaagcacucauaa

SEQ ID NO: 38196 - RNA, 21 nt, artificial
  Chemically synthesized
agauacuucuguaacuuaaga

SEQ ID NO: 38197 - RNA, 21 nt, artificial
  Chemically synthesized
gguaagcuuuaucauauauau

SEQ ID NO: 38198 - RNA, 21 nt, artificial
  Chemically synthesized
caaaggguauggucaucuguu

SEQ ID NO: 38199 - RNA, 21 nt, artificial
  Chemically synthesized
agucaguagaauaaaaucuua

SEQ ID NO: 38200 - RNA, 21 nt, artificial
  Chemically synthesized
ccuuuuuucuuuguuguuuuu

SEQ ID NO: 38201 - RNA, 21 nt, artificial
  Chemically synthesized
gcaguaauuaaagaaaaaagu

SEQ ID NO: 38202 - RNA, 21 nt, artificial
  Chemically synthesized
uuuagaagucaguagaauaaa

SEQ ID NO: 38203 - RNA, 21 nt, artificial
  Chemically synthesized
caccuugagccuuaaaacggu

SEQ ID NO: 38204 - RNA, 21 nt, artificial
  Chemically synthesized
uuuuguaaggagagguuuuaa

SEQ ID NO: 38205 - RNA, 21 nt, artificial
  Chemically synthesized
ucuuauuuuuccaacagcuaa

SEQ ID NO: 38206 - RNA, 21 nt, artificial
  Chemically synthesized
aaggcaacucguacccaaauu

SEQ ID NO: 38207 - RNA, 21 nt, artificial
  Chemically synthesized
auccuucaauuucuguauaaa

SEQ ID NO: 38208 - RNA, 21 nt, artificial
  Chemically synthesized
guuuggacuuuguaauuauuu

SEQ ID NO: 38209 - RNA, 21 nt, artificial
  Chemically synthesized
uuuguaaggagagguuuuaau

SEQ ID NO: 38210 - RNA, 21 nt, artificial
  Chemically synthesized
cccuuuuuucuuuguuguuuu

SEQ ID NO: 38211 - RNA, 21 nt, artificial
  Chemically synthesized
caucuguuguuaaauuauguu

SEQ ID NO: 38212 - RNA, 21 nt, artificial
  Chemically synthesized
gaaacuuguuucuuuuuuugu

SEQ ID NO: 38213 - RNA, 21 nt, artificial
  Chemically synthesized
aauaaaggccuuauuuugcaa

SEQ ID NO: 38214 - RNA, 21 nt, artificial
  Chemically synthesized
aagauacuucuguaacuuaag

SEQ ID NO: 38215 - RNA, 21 nt, artificial
  Chemically synthesized
ccuucaauuucuguauaaaag

SEQ ID NO: 38216 - RNA, 21 nt, artificial
  Chemically synthesized
uugguaagcuuuaucauauau

SEQ ID NO: 38217 - RNA, 21 nt, artificial
  Chemically synthesized
caauuucuguauaaaagcaga

SEQ ID NO: 38218 - RNA, 21 nt, artificial
  Chemically synthesized
aaauaaaggccuuauuuugca

SEQ ID NO: 38219 - RNA, 21 nt, artificial
  Chemically synthesized
caaccagaguauuuuuguaca

SEQ ID NO: 38220 - RNA, 21 nt, artificial
  Chemically synthesized
cugccuuaaaaaaaaauaaag

SEQ ID NO: 38221 - RNA, 21 nt, artificial
  Chemically synthesized
aaggccuuauuuugcaauuau

SEQ ID NO: 38222 - RNA, 21 nt, artificial
  Chemically synthesized
aaaaauaaccgaagaaagaga

SEQ ID NO: 38223 - RNA, 21 nt, artificial
  Chemically synthesized
uccuaaaaauaaccgaagaaa

SEQ ID NO: 38224 - RNA, 21 nt, artificial
  Chemically synthesized
uccacuugcuaaaauuauuua

SEQ ID NO: 38225 - RNA, 21 nt, artificial
  Chemically synthesized
cuguauaaaagcagaucuuuu

SEQ ID NO: 38226 - RNA, 21 nt, artificial
  Chemically synthesized
guagaauaaaaucuuaaagca

SEQ ID NO: 38227 - RNA, 21 nt, artificial
  Chemically synthesized
uguauaaaugagagauugcaa

SEQ ID NO: 38228 - RNA, 21 nt, artificial
  Chemically synthesized
aaaacaaacuggaaacuuguu

SEQ ID NO: 38229 - RNA, 21 nt, artificial
  Chemically synthesized
gagaaacuggacuuuuuaaac

SEQ ID NO: 38230 - RNA, 21 nt, artificial
  Chemically synthesized
ugacagaccuuaaucuuaauu

SEQ ID NO: 38231 - RNA, 21 nt, artificial
  Chemically synthesized
aagucaguagaauaaaaucuu

SEQ ID NO: 38232 - RNA, 21 nt, artificial
  Chemically synthesized
cuccaccuucaccuacaugaa

SEQ ID NO: 38233 - RNA, 21 nt, artificial
  Chemically synthesized
auacuucuguaacuuaagaaa

SEQ ID NO: 38234 - RNA, 21 nt, artificial
  Chemically synthesized
cagaguauuuuuguacagauu

SEQ ID NO: 38235 - RNA, 21 nt, artificial
  Chemically synthesized
cuucuucuucuuccuuaaaga

SEQ ID NO: 38236 - RNA, 21 nt, artificial
  Chemically synthesized
ggguauggucaucuguuguua

SEQ ID NO: 38237 - RNA, 21 nt, artificial
  Chemically synthesized
acauuccacuugcuaaaauua

SEQ ID NO: 38238 - RNA, 21 nt, artificial
  Chemically synthesized
ucguguuuuguuuguuucacu

SEQ ID NO: 38239 - RNA, 21 nt, artificial
  Chemically synthesized
cuucuuccuuaaagacauuua

SEQ ID NO: 38240 - RNA, 21 nt, artificial
  Chemically synthesized
cucgaaacugacuggaaacuu

SEQ ID NO: 38241 - RNA, 21 nt, artificial
  Chemically synthesized
aaagcggagcucgaaacugac

SEQ ID NO: 38242 - RNA, 21 nt, artificial
  Chemically synthesized
agaguauuuuuguacagauuu

SEQ ID NO: 38243 - RNA, 21 nt, artificial
  Chemically synthesized
cuggaaacuuguuucuuuuuu

SEQ ID NO: 38244 - RNA, 21 nt, artificial
  Chemically synthesized
agcauuugguaagcuuuauca

SEQ ID NO: 38245 - RNA, 21 nt, artificial
  Chemically synthesized
aggccuuauuuugcaauuaug

SEQ ID NO: 38246 - RNA, 21 nt, artificial
  Chemically synthesized
cuucaauuucuguauaaaagc

SEQ ID NO: 38247 - RNA, 21 nt, artificial
  Chemically synthesized
agcaguaauuaaagaaaaaag

SEQ ID NO: 38248 - RNA, 21 nt, artificial
  Chemically synthesized
aaagcagaucuuuuuaaaaag

SEQ ID NO: 38249 - RNA, 21 nt, artificial
  Chemically synthesized
aaucauauuuugucuuuaggu

SEQ ID NO: 38250 - RNA, 21 nt, artificial
  Chemically synthesized
agaccuuaaucuuaauuacug

SEQ ID NO: 38251 - RNA, 21 nt, artificial
  Chemically synthesized
uaaaaucuuaaagcacucaua

SEQ ID NO: 38252 - RNA, 21 nt, artificial
  Chemically synthesized
uaaacuacucuuaguugaaca

SEQ ID NO: 38253 - RNA, 21 nt, artificial
  Chemically synthesized
uccuuaaagacauuuaagcua

SEQ ID NO: 38254 - RNA, 21 nt, artificial
  Chemically synthesized
agaauaaaaucuuaaagcacu

SEQ ID NO: 38255 - RNA, 21 nt, artificial
  Chemically synthesized
cagaccuuugggcugccuuau

SEQ ID NO: 38256 - RNA, 21 nt, artificial
  Chemically synthesized
uuuguauaaaugccuuuuugu

SEQ ID NO: 38257 - RNA, 21 nt, artificial
  Chemically synthesized
aucuuaaagcacucauaauau

SEQ ID NO: 38258 - RNA, 21 nt, artificial
  Chemically synthesized
guaugauucauuaccauuuug

SEQ ID NO: 38259 - RNA, 21 nt, artificial
  Chemically synthesized
cccuagcuuuucuugcaacca

SEQ ID NO: 38260 - RNA, 21 nt, artificial
  Chemically synthesized
gaauaaaaucuuaaagcacuc

SEQ ID NO: 38261 - RNA, 21 nt, artificial
  Chemically synthesized
aggaccacccggauuacaagu

SEQ ID NO: 38262 - RNA, 21 nt, artificial
  Chemically synthesized
uuguaaggagagguuuuaauu

SEQ ID NO: 38263 - RNA, 21 nt, artificial
  Chemically synthesized
uugcaauuaugggaguaaaca

SEQ ID NO: 38264 - RNA, 21 nt, artificial
  Chemically synthesized
guguaugauucauuaccauuu

SEQ ID NO: 38265 - RNA, 21 nt, artificial
  Chemically synthesized
uauggucaucuguuguuaaau

SEQ ID NO: 38266 - RNA, 21 nt, artificial
  Chemically synthesized
auaaaaucuuaaagcacucau

SEQ ID NO: 38267 - RNA, 21 nt, artificial
  Chemically synthesized
aaggguauggucaucuguugu

SEQ ID NO: 38268 - RNA, 21 nt, artificial
  Chemically synthesized
cuagagaguuugaggauugcu

SEQ ID NO: 38269 - RNA, 21 nt, artificial
  Chemically synthesized
uggaaacuuguuucuuuuuuu

SEQ ID NO: 38270 - RNA, 21 nt, artificial
  Chemically synthesized
auuuuuccaacagcuaaacua

SEQ ID NO: 38271 - RNA, 21 nt, artificial
  Chemically synthesized
aauaaaaucuuaaagcacuca

SEQ ID NO: 38272 - RNA, 21 nt, artificial
  Chemically synthesized
uucuuuguuguuuuuguugaa

SEQ ID NO: 38273 - RNA, 21 nt, artificial
  Chemically synthesized
uucuucuucuucuuccuuaaa

SEQ ID NO: 38274 - RNA, 21 nt, artificial
  Chemically synthesized
caguaauuaaagaaaaaaguc

SEQ ID NO: 38275 - RNA, 21 nt, artificial
  Chemically synthesized
uuuuagaagucaguagaauaa

SEQ ID NO: 38276 - RNA, 21 nt, artificial
  Chemically synthesized
uaaagaagagaaaaacaccuu

SEQ ID NO: 38277 - RNA, 21 nt, artificial
  Chemically synthesized
gaggaccaaccagaauucccu

SEQ ID NO: 38278 - RNA, 21 nt, artificial
  Chemically synthesized
cuguuguuaaauuauguucuu

SEQ ID NO: 38279 - RNA, 21 nt, artificial
  Chemically synthesized
uuaacuuugcuuaauuccuca

SEQ ID NO: 38280 - RNA, 21 nt, artificial
  Chemically synthesized
uuccucacccuagauuuguau

SEQ ID NO: 38281 - RNA, 21 nt, artificial
  Chemically synthesized
gaacuccagcuccuacuacag

SEQ ID NO: 38282 - RNA, 21 nt, artificial
  Chemically synthesized
agaacaccagcaguuaaccuu

SEQ ID NO: 38283 - RNA, 21 nt, artificial
  Chemically synthesized
gugaggaauauucucuauuuu

SEQ ID NO: 38284 - RNA, 21 nt, artificial
  Chemically synthesized
auuugguaagcuuuaucauau

SEQ ID NO: 38285 - RNA, 21 nt, artificial
  Chemically synthesized
uaaaugcucuuauuuuuccaa

SEQ ID NO: 38286 - RNA, 21 nt, artificial
  Chemically synthesized
aguguaucacugagucauuug

SEQ ID NO: 38287 - RNA, 21 nt, artificial
  Chemically synthesized
aucccuuuuuucuuuguuguu

SEQ ID NO: 38288 - RNA, 21 nt, artificial
  Chemically synthesized
cuucuguaacuuaagaaaccu

SEQ ID NO: 38289 - RNA, 21 nt, artificial
  Chemically synthesized
cagaacaccagcaguuaaccu

SEQ ID NO: 38290 - RNA, 21 nt, artificial
  Chemically synthesized
ucuuuaaaauagguuguugga

SEQ ID NO: 38291 - RNA, 21 nt, artificial
  Chemically synthesized
uuuuguugaaaacaaacugga

SEQ ID NO: 38292 - RNA, 21 nt, artificial
  Chemically synthesized
uguauaaaagcagaucuuuuu

SEQ ID NO: 38293 - RNA, 21 nt, artificial
  Chemically synthesized
cuucuucuuccuuaaagacau

SEQ ID NO: 38294 - RNA, 21 nt, artificial
  Chemically synthesized
auagguuguuggagcuuuccu

SEQ ID NO: 38295 - RNA, 21 nt, artificial
  Chemically synthesized
ugucuuuagguaaaagcuuug

SEQ ID NO: 38296 - RNA, 21 nt, artificial
  Chemically synthesized
aaugcucuuauuuuuccaaca

SEQ ID NO: 38297 - RNA, 21 nt, artificial
  Chemically synthesized
ugccuguuuggacuuuguaau

SEQ ID NO: 38298 - RNA, 21 nt, artificial
  Chemically synthesized
uuguugaaaacaaacuggaaa

SEQ ID NO: 38299 - RNA, 21 nt, artificial
  Chemically synthesized
uguucugggaauguuucagca

SEQ ID NO: 38300 - RNA, 21 nt, artificial
  Chemically synthesized
acccuagauuuguauaaaugc

SEQ ID NO: 38301 - RNA, 21 nt, artificial
  Chemically synthesized
uuuguugaaaacaaacuggaa

SEQ ID NO: 38302 - RNA, 21 nt, artificial
  Chemically synthesized
ucaccugugccucucagaaca

SEQ ID NO: 38303 - RNA, 21 nt, artificial
  Chemically synthesized
acagcuaaacuacucuuaguu

SEQ ID NO: 38304 - RNA, 21 nt, artificial
  Chemically synthesized
cuucaugaagaugaccgacga

SEQ ID NO: 38305 - RNA, 21 nt, artificial
  Chemically synthesized
uuaaaagcaaguuucuuugua

SEQ ID NO: 38306 - RNA, 21 nt, artificial
  Chemically synthesized
uguuuggacuuuguaauuauu

SEQ ID NO: 38307 - RNA, 21 nt, artificial
  Chemically synthesized
agaggaccaaccagaauuccc

SEQ ID NO: 38308 - RNA, 21 nt, artificial
  Chemically synthesized
gcucuuauuuuuccaacagcu

SEQ ID NO: 38309 - RNA, 21 nt, artificial
  Chemically synthesized
aggaccaaccagaauucccuu

SEQ ID NO: 38310 - RNA, 21 nt, artificial
  Chemically synthesized
uuuuaaacccucuucagagca

SEQ ID NO: 38311 - RNA, 21 nt, artificial
  Chemically synthesized
cucugccuguuuggacuuugu

SEQ ID NO: 38312 - RNA, 21 nt, artificial
  Chemically synthesized
gagcuuuccucaaaggguaug

SEQ ID NO: 38313 - RNA, 21 nt, artificial
  Chemically synthesized
gaagucaguagaauaaaaucu

SEQ ID NO: 38314 - RNA, 21 nt, artificial
  Chemically synthesized
uagcuuuucuugcaaccagag

SEQ ID NO: 38315 - RNA, 21 nt, artificial
  Chemically synthesized
cuuugcuuaauuccucaggcu

SEQ ID NO: 38316 - RNA, 21 nt, artificial
  Chemically synthesized
ucuuaaagcacucauaauaug

SEQ ID NO: 38317 - RNA, 21 nt, artificial
  Chemically synthesized
guuggagcuuuccucaaaggg

SEQ ID NO: 38318 - RNA, 21 nt, artificial
  Chemically synthesized
uguauuccucacccuagauuu

SEQ ID NO: 38319 - RNA, 21 nt, artificial
  Chemically synthesized
ugggaguaaacaauagucuag

SEQ ID NO: 38320 - RNA, 21 nt, artificial
  Chemically synthesized
ucaucuguuguuaaauuaugu

SEQ ID NO: 38321 - RNA, 21 nt, artificial
  Chemically synthesized
accagaguauuuuuguacaga

SEQ ID NO: 38322 - RNA, 21 nt, artificial
  Chemically synthesized
aacggugcugcugggaaacau

SEQ ID NO: 38323 - RNA, 21 nt, artificial
  Chemically synthesized
ugcccuagcuuuucuugcaac

SEQ ID NO: 38324 - RNA, 21 nt, artificial
  Chemically synthesized
auuccacuugcuaaaauuauu

SEQ ID NO: 38325 - RNA, 21 nt, artificial
  Chemically synthesized
cuuuuuaaacccucuucagag

SEQ ID NO: 38326 - RNA, 21 nt, artificial
  Chemically synthesized
ccuucuuuaaaauagguuguu

SEQ ID NO: 38327 - RNA, 21 nt, artificial
  Chemically synthesized
aaacugacuggaaacuucagu

SEQ ID NO: 38328 - RNA, 21 nt, artificial
  Chemically synthesized
caguagaauaaaaucuuaaag

SEQ ID NO: 38329 - RNA, 21 nt, artificial
  Chemically synthesized
aacuggaaacuuguuucuuuu

SEQ ID NO: 38330 - RNA, 21 nt, artificial
  Chemically synthesized
accuuaaucuuaauuacugcu

SEQ ID NO: 38331 - RNA, 21 nt, artificial
  Chemically synthesized
uuuuguucucuccgugaaacu

SEQ ID NO: 38332 - RNA, 21 nt, artificial
  Chemically synthesized
agaagucaguagaauaaaauc

SEQ ID NO: 38333 - RNA, 21 nt, artificial
  Chemically synthesized
ccggaaacuuuucuuugcagg

SEQ ID NO: 38334 - RNA, 21 nt, artificial
  Chemically synthesized
aaggaccacccggauuacaag

SEQ ID NO: 38335 - RNA, 21 nt, artificial
  Chemically synthesized
aaacauuugcacucuuuuagu

SEQ ID NO: 38336 - RNA, 21 nt, artificial
  Chemically synthesized
augaccuauccaagcgcauua

SEQ ID NO: 38337 - RNA, 21 nt, artificial
  Chemically synthesized
uguuuuuguugaaaacaaacu

SEQ ID NO: 38338 - RNA, 21 nt, artificial
  Chemically synthesized
aaacaaacuggaaacuuguuu

SEQ ID NO: 38339 - RNA, 21 nt, artificial
  Chemically synthesized
gcauuuaaaucauauuuuguc

SEQ ID NO: 38340 - RNA, 21 nt, artificial
  Chemically synthesized
uauaaaugccuuuuuguccau

SEQ ID NO: 38341 - RNA, 21 nt, artificial
  Chemically synthesized
ugcugcugggaaacauuugca

SEQ ID NO: 38342 - RNA, 21 nt, artificial
  Chemically synthesized
uauaaaugagagauugcaaau

SEQ ID NO: 38343 - RNA, 21 nt, artificial
  Chemically synthesized
uugucuuuagguaaaagcuuu

SEQ ID NO: 38344 - RNA, 21 nt, artificial
  Chemically synthesized
cacugcagucuuaagaaagag

SEQ ID NO: 38345 - RNA, 21 nt, artificial
  Chemically synthesized
ugugaucagugugcuaaaucu

SEQ ID NO: 38346 - RNA, 21 nt, artificial
  Chemically synthesized
cugcagucuuaagaaagaggu

SEQ ID NO: 38347 - RNA, 21 nt, artificial
  Chemically synthesized
agcuuuucuugcaaccagagu

SEQ ID NO: 38348 - RNA, 21 nt, artificial
  Chemically synthesized
aauuaugggaguaaacaauag

SEQ ID NO: 38349 - RNA, 21 nt, artificial
  Chemically synthesized
uauuuuguaaggagagguuuu

SEQ ID NO: 38350 - RNA, 21 nt, artificial
  Chemically synthesized
cuagauuuguauaaaugccuu

SEQ ID NO: 38351 - RNA, 21 nt, artificial
  Chemically synthesized
ugugcccuagcuuuucuugca

SEQ ID NO: 38352 - RNA, 21 nt, artificial
  Chemically synthesized
guuuuguuuguuucacuuguu

SEQ ID NO: 38353 - RNA, 21 nt, artificial
  Chemically synthesized
cagaacuccagcuccuacuac

SEQ ID NO: 38354 - RNA, 21 nt, artificial
  Chemically synthesized
auuuuguaaggagagguuuua

SEQ ID NO: 38355 - RNA, 21 nt, artificial
  Chemically synthesized
aauuucuguauaaaagcagau

SEQ ID NO: 38356 - RNA, 21 nt, artificial
  Chemically synthesized
cauuugcacucuuuuagugca

SEQ ID NO: 38357 - RNA, 21 nt, artificial
  Chemically synthesized
ccuucaugaagaugaccgacg

SEQ ID NO: 38358 - RNA, 21 nt, artificial
  Chemically synthesized
cccacuuuugcucuuuuuccu

SEQ ID NO: 38359 - RNA, 21 nt, artificial
  Chemically synthesized
gaaacuggacuuuuuaaaccc

SEQ ID NO: 38360 - RNA, 21 nt, artificial
  Chemically synthesized
uuccucaaaggguauggucau

SEQ ID NO: 38361 - RNA, 21 nt, artificial
  Chemically synthesized
uagaauaaaaucuuaaagcac

SEQ ID NO: 38362 - RNA, 21 nt, artificial
  Chemically synthesized
gucuuaagaaagagguaaaag

SEQ ID NO: 38363 - RNA, 21 nt, artificial
  Chemically synthesized
cuuuuuguccaucccuuuuuu

SEQ ID NO: 38364 - RNA, 21 nt, artificial
  Chemically synthesized
uguuggagcuuuccucaaagg

SEQ ID NO: 38365 - RNA, 21 nt, artificial
  Chemically synthesized
uaaaagcaaguuucuuuguau

SEQ ID NO: 38366 - RNA, 21 nt, artificial
  Chemically synthesized
cacucuuuuagugcauuuccu

SEQ ID NO: 38367 - RNA, 21 nt, artificial
  Chemically synthesized
aaucaacgagaaacuggacuu

SEQ ID NO: 38368 - RNA, 21 nt, artificial
  Chemically synthesized
acaccuugagccuuaaaacgg

SEQ ID NO: 38369 - RNA, 21 nt, artificial
  Chemically synthesized
uuugcuuaauuccucaggcuu

SEQ ID NO: 38370 - RNA, 21 nt, artificial
  Chemically synthesized
gaaaucuguucugggaauguu

SEQ ID NO: 38371 - RNA, 21 nt, artificial
  Chemically synthesized
caacagcuaaacuacucuuag

SEQ ID NO: 38372 - RNA, 21 nt, artificial
  Chemically synthesized
agagaguuugaggauugcuuu

SEQ ID NO: 38373 - RNA, 21 nt, artificial
  Chemically synthesized
guucugggaauguuucagcag

SEQ ID NO: 38374 - RNA, 21 nt, artificial
  Chemically synthesized
agucauuugcaguguuuucug

SEQ ID NO: 38375 - RNA, 21 nt, artificial
  Chemically synthesized
aagcauuugguaagcuuuauc

SEQ ID NO: 38376 - RNA, 21 nt, artificial
  Chemically synthesized
cuacucuuaguugaacagugu

SEQ ID NO: 38377 - RNA, 21 nt, artificial
  Chemically synthesized
uuaaaugcucuuauuuuucca

SEQ ID NO: 38378 - RNA, 21 nt, artificial
  Chemically synthesized
aaacuggacuuuuuaaacccu

SEQ ID NO: 38379 - RNA, 21 nt, artificial
  Chemically synthesized
ucuuuguauuccucacccuag

SEQ ID NO: 38380 - RNA, 21 nt, artificial
  Chemically synthesized
uauuaacaguuuuagaaguca

SEQ ID NO: 38381 - RNA, 21 nt, artificial
  Chemically synthesized
uuaacaguuuuagaagucagu

SEQ ID NO: 38382 - RNA, 21 nt, artificial
  Chemically synthesized
uuuuaaagaagagaaaaacac

SEQ ID NO: 38383 - RNA, 21 nt, artificial
  Chemically synthesized
acugagucauuugcaguguuu

SEQ ID NO: 38384 - RNA, 21 nt, artificial
  Chemically synthesized
uuccucaggcuuugcgauuua

SEQ ID NO: 38385 - RNA, 21 nt, artificial
  Chemically synthesized
gccuuauuuugcaauuauggg

SEQ ID NO: 38386 - RNA, 21 nt, artificial
  Chemically synthesized
uucuguaacuuaagaaaccug

SEQ ID NO: 38387 - RNA, 21 nt, artificial
  Chemically synthesized
ucuuuguuguuuuuguugaaa

SEQ ID NO: 38388 - RNA, 21 nt, artificial
  Chemically synthesized
uuuuguccaucccuuuuuucu

SEQ ID NO: 38389 - RNA, 21 nt, artificial
  Chemically synthesized
cacaaaaacaaugcaagcaug

SEQ ID NO: 38390 - RNA, 21 nt, artificial
  Chemically synthesized
ucaauuucuguauaaaagcag

SEQ ID NO: 38391 - RNA, 21 nt, artificial
  Chemically synthesized
uucuuccuuaaagacauuuaa

SEQ ID NO: 38392 - RNA, 21 nt, artificial
  Chemically synthesized
ccuagcuuuucuugcaaccag

SEQ ID NO: 38393 - RNA, 21 nt, artificial
  Chemically synthesized
gcccacugacagaccuuaauc

SEQ ID NO: 38394 - RNA, 21 nt, artificial
  Chemically synthesized
acugcagucuuaagaaagagg

SEQ ID NO: 38395 - RNA, 21 nt, artificial
  Chemically synthesized
agguaaaagcuuugguuugug

SEQ ID NO: 38396 - RNA, 21 nt, artificial
  Chemically synthesized
aaaagcaaguuucuuuguauu

SEQ ID NO: 38397 - RNA, 21 nt, artificial
  Chemically synthesized
aaugccuuuuuguccaucccu

SEQ ID NO: 38398 - RNA, 21 nt, artificial
  Chemically synthesized
uuaccuucuuuaaaauagguu

SEQ ID NO: 38399 - RNA, 21 nt, artificial
  Chemically synthesized
uaaaaagauacuucuguaacu

SEQ ID NO: 38400 - RNA, 21 nt, artificial
  Chemically synthesized
aucauauuuugucuuuaggua

SEQ ID NO: 38401 - RNA, 21 nt, artificial
  Chemically synthesized
augccuuuuuguccaucccuu

SEQ ID NO: 38402 - RNA, 21 nt, artificial
  Chemically synthesized
aacgcacaucaagacggagca

SEQ ID NO: 38403 - RNA, 21 nt, artificial
  Chemically synthesized
cagaucuuuuuaaaaagauac

SEQ ID NO: 38404 - RNA, 21 nt, artificial
  Chemically synthesized
uuuccucaaaggguaugguca

SEQ ID NO: 38405 - RNA, 21 nt, artificial
  Chemically synthesized
uucaagacauuccacuugcua

SEQ ID NO: 38406 - RNA, 21 nt, artificial
  Chemically synthesized
aguuuuagaagucaguagaau

SEQ ID NO: 38407 - RNA, 21 nt, artificial
  Chemically synthesized
uuguuuuuguugaaaacaaac

SEQ ID NO: 38408 - RNA, 21 nt, artificial
  Chemically synthesized
cgucaucuccaacaucgagac

SEQ ID NO: 38409 - RNA, 21 nt, artificial
  Chemically synthesized
uucaauuucuguauaaaagca

SEQ ID NO: 38410 - RNA, 21 nt, artificial
  Chemically synthesized
ccaccuucaccuacaugaacc

SEQ ID NO: 38411 - RNA, 21 nt, artificial
  Chemically synthesized
uucacugcagucuuaagaaag

SEQ ID NO: 38412 - RNA, 21 nt, artificial
  Chemically synthesized
auuaugggaguaaacaauagu

SEQ ID NO: 38413 - RNA, 21 nt, artificial
  Chemically synthesized
uaacaguuuuagaagucagua

SEQ ID NO: 38414 - RNA, 21 nt, artificial
  Chemically synthesized
uuguucacugcagucuuaaga

SEQ ID NO: 38415 - RNA, 21 nt, artificial
  Chemically synthesized
caccuucaccuacaugaaccc

SEQ ID NO: 38416 - RNA, 21 nt, artificial
  Chemically synthesized
auuuugcaauuaugggaguaa

SEQ ID NO: 38417 - RNA, 21 nt, artificial
  Chemically synthesized
gcuaaauggagcagcgaaauc

SEQ ID NO: 38418 - RNA, 21 nt, artificial
  Chemically synthesized
uuuaaggaggagcugccuuaa

SEQ ID NO: 38419 - RNA, 21 nt, artificial
  Chemically synthesized
uugcuuaauuccucaggcuuu

SEQ ID NO: 38420 - RNA, 21 nt, artificial
  Chemically synthesized
aagaaaaaaguccucugugag

SEQ ID NO: 38421 - RNA, 21 nt, artificial
  Chemically synthesized
aaacuacucuuaguugaacag

SEQ ID NO: 38422 - RNA, 21 nt, artificial
  Chemically synthesized
uuguauaaaugagagauugca

SEQ ID NO: 38423 - RNA, 21 nt, artificial
  Chemically synthesized
uuucuuuguauuccucacccu

SEQ ID NO: 38424 - RNA, 21 nt, artificial
  Chemically synthesized
uacucuuaguugaacagugug

SEQ ID NO: 38425 - RNA, 21 nt, artificial
  Chemically synthesized
gcccuagcuuuucuugcaacc

SEQ ID NO: 38426 - RNA, 21 nt, artificial
  Chemically synthesized
gauuuguauaaaugccuuuuu

SEQ ID NO: 38427 - RNA, 21 nt, artificial
  Chemically synthesized
aauuauguucuuaacuguaac

SEQ ID NO: 38428 - RNA, 21 nt, artificial
  Chemically synthesized
ucuucuuccuuaaagacauuu

SEQ ID NO: 38429 - RNA, 21 nt, artificial
  Chemically synthesized
cucaggcuuugcgauuuaagg

SEQ ID NO: 38430 - RNA, 21 nt, artificial
  Chemically synthesized
augauccuaaaaauaaccgaa

SEQ ID NO: 38431 - RNA, 21 nt, artificial
  Chemically synthesized
aaagcaaguuucuuuguauuc

SEQ ID NO: 38432 - RNA, 21 nt, artificial
  Chemically synthesized
gccuuugcuuguucacugcag

SEQ ID NO: 38433 - RNA, 21 nt, artificial
  Chemically synthesized
ccacuuuugcucuuuuuccuc

SEQ ID NO: 38434 - RNA, 21 nt, artificial
  Chemically synthesized
cuuuagguaaaagcuuugguu

SEQ ID NO: 38435 - RNA, 21 nt, artificial
  Chemically synthesized
uauccaagcgcauuacccacu

SEQ ID NO: 38436 - RNA, 21 nt, artificial
  Chemically synthesized
acauuuaagcuaaaggcaacu

SEQ ID NO: 38437 - RNA, 21 nt, artificial
  Chemically synthesized
uauuccucacccuagauuugu

SEQ ID NO: 38438 - RNA, 21 nt, artificial
  Chemically synthesized
aaaucauauuuugucuuuagg

SEQ ID NO: 38439 - RNA, 21 nt, artificial
  Chemically synthesized
cuuccuuaaagacauuuaagc

SEQ ID NO: 38440 - RNA, 21 nt, artificial
  Chemically synthesized
ccucugugaggaauauucucu

SEQ ID NO: 38441 - RNA, 21 nt, artificial
  Chemically synthesized
aaacuggaaacuuguuucuuu

SEQ ID NO: 38442 - RNA, 21 nt, artificial
  Chemically synthesized
uucagagcaagcguggaggau

SEQ ID NO: 38443 - RNA, 21 nt, artificial
  Chemically synthesized
aacagcuaaacuacucuuagu

SEQ ID NO: 38444 - RNA, 21 nt, artificial
  Chemically synthesized
ucaaaggguauggucaucugu

SEQ ID NO: 38445 - RNA, 21 nt, artificial
  Chemically synthesized
ucuuaagaaagagguaaaagg

SEQ ID NO: 38446 - RNA, 21 nt, artificial
  Chemically synthesized
cuucugaacgagagcgagaag

SEQ ID NO: 38447 - RNA, 21 nt, artificial
  Chemically synthesized
cuuuucuugcaaccagaguau

SEQ ID NO: 38448 - RNA, 21 nt, artificial
  Chemically synthesized
gcuuaauuccucaggcuuugc

SEQ ID NO: 38449 - RNA, 21 nt, artificial
  Chemically synthesized
ggaaacuuguuucuuuuuuug

SEQ ID NO: 38450 - RNA, 21 nt, artificial
  Chemically synthesized
uguucucuccgugaaacuuac

SEQ ID NO: 38451 - RNA, 21 nt, artificial
  Chemically synthesized
aacaguuuuagaagucaguag

SEQ ID NO: 38452 - RNA, 21 nt, artificial
  Chemically synthesized
gcuuugcgauuuaaggaggag

SEQ ID NO: 38453 - RNA, 21 nt, artificial
  Chemically synthesized
uagauuuguauaaaugccuuu

SEQ ID NO: 38454 - RNA, 21 nt, artificial
  Chemically synthesized
ucuuuagguaaaagcuuuggu

SEQ ID NO: 38455 - RNA, 21 nt, artificial
  Chemically synthesized
aagcaaaggagaugaaaucug

SEQ ID NO: 38456 - RNA, 21 nt, artificial
  Chemically synthesized
ucaacgagaaacuggacuuuu

SEQ ID NO: 38457 - RNA, 21 nt, artificial
  Chemically synthesized
gaaaucaacgagaaacuggac

SEQ ID NO: 38458 - RNA, 21 nt, artificial
  Chemically synthesized
uagagaagcauuugguaagcu

SEQ ID NO: 38459 - RNA, 21 nt, artificial
  Chemically synthesized
cucuggagacuucugaacgag

SEQ ID NO: 38460 - RNA, 21 nt, artificial
  Chemically synthesized
uugcaaccagaguauuuuugu

SEQ ID NO: 38461 - RNA, 21 nt, artificial
  Chemically synthesized
ugugaggaauauucucuauuu

SEQ ID NO: 38462 - RNA, 21 nt, artificial
  Chemically synthesized
uuuuguuuguuucacuuguuu

SEQ ID NO: 38463 - RNA, 21 nt, artificial
  Chemically synthesized
gacgucaucuccaacaucgag

SEQ ID NO: 38464 - RNA, 21 nt, artificial
  Chemically synthesized
uaaaaauaaccgaagaaagag

SEQ ID NO: 38465 - RNA, 21 nt, artificial
  Chemically synthesized
aucagugugcuaaaucucucu

SEQ ID NO: 38466 - RNA, 21 nt, artificial
  Chemically synthesized
uuguuguuuuuguugaaaaca

SEQ ID NO: 38467 - RNA, 21 nt, artificial
  Chemically synthesized
guuaaauuauguucuuaacug

SEQ ID NO: 38468 - RNA, 21 nt, artificial
  Chemically synthesized
auaaaggccuuauuuugcaau

SEQ ID NO: 38469 - RNA, 21 nt, artificial
  Chemically synthesized
uuccacuugcuaaaauuauuu

SEQ ID NO: 38470 - RNA, 21 nt, artificial
  Chemically synthesized
gaguauuuuuguacagauuug

SEQ ID NO: 38471 - RNA, 21 nt, artificial
  Chemically synthesized
cagugugcuaaaucucucugc

SEQ ID NO: 38472 - RNA, 21 nt, artificial
  Chemically synthesized
agaaaaaaguccucugugagg

SEQ ID NO: 38473 - RNA, 21 nt, artificial
  Chemically synthesized
uuuugcaauuaugggaguaaa

SEQ ID NO: 38474 - RNA, 21 nt, artificial
  Chemically synthesized
cagcuaaacuacucuuaguug

SEQ ID NO: 38475 - RNA, 21 nt, artificial
  Chemically synthesized
aaaggccuuauuuugcaauua

SEQ ID NO: 38476 - RNA, 21 nt, artificial
  Chemically synthesized
uuucuugcaaccagaguauuu

SEQ ID NO: 38477 - RNA, 21 nt, artificial
  Chemically synthesized
gaccuauccaagcgcauuacc

SEQ ID NO: 38478 - RNA, 21 nt, artificial
  Chemically synthesized
uuaauuccucaggcuuugcga

SEQ ID NO: 38479 - RNA, 21 nt, artificial
  Chemically synthesized
uaagcuaaaggcaacucguac

SEQ ID NO: 38480 - RNA, 21 nt, artificial
  Chemically synthesized
cucuacaucuucucuuggagu

SEQ ID NO: 38481 - RNA, 21 nt, artificial
  Chemically synthesized
cuugcaaccagaguauuuuug

SEQ ID NO: 38482 - RNA, 21 nt, artificial
  Chemically synthesized
aacggcuccagcaagaacaag

SEQ ID NO: 38483 - RNA, 21 nt, artificial
  Chemically synthesized
gagguaaaaggcaagcaaagg

SEQ ID NO: 38484 - RNA, 21 nt, artificial
  Chemically synthesized
acaucuucucuuggagugagg

SEQ ID NO: 38485 - RNA, 21 nt, artificial
  Chemically synthesized
cuccugccuuugcuuguucac

SEQ ID NO: 38486 - RNA, 21 nt, artificial
  Chemically synthesized
cuuaaaaaaaaauaaaggccu

SEQ ID NO: 38487 - RNA, 21 nt, artificial
  Chemically synthesized
accuucgaugucaacgaguuu

SEQ ID NO: 38488 - RNA, 21 nt, artificial
  Chemically synthesized
aaagaagagaaaaacaccuug

SEQ ID NO: 38489 - RNA, 21 nt, artificial
  Chemically synthesized
gcugcugggaaacauuugcac

SEQ ID NO: 38490 - RNA, 21 nt, artificial
  Chemically synthesized
caaauguaguguaucacugag

SEQ ID NO: 38491 - RNA, 21 nt, artificial
  Chemically synthesized
uggagacuucugaacgagagc

SEQ ID NO: 38492 - RNA, 21 nt, artificial
  Chemically synthesized
uuauguucuuaacuguaacca

SEQ ID NO: 38493 - RNA, 21 nt, artificial
  Chemically synthesized
uuaaagaagagaaaaacaccu

SEQ ID NO: 38494 - RNA, 21 nt, artificial
  Chemically synthesized
uuguuggagcuuuccucaaag

SEQ ID NO: 38495 - RNA, 21 nt, artificial
  Chemically synthesized
guauuuuuguacagauuugcu

SEQ ID NO: 38496 - RNA, 21 nt, artificial
  Chemically synthesized
aacuggacuuuuuaaacccuc

SEQ ID NO: 38497 - RNA, 21 nt, artificial
  Chemically synthesized
ucuucuucuucuuccuuaaag

SEQ ID NO: 38498 - RNA, 21 nt, artificial
  Chemically synthesized
aucagcccacugacagaccuu

SEQ ID NO: 38499 - RNA, 21 nt, artificial
  Chemically synthesized
guucucuccgugaaacuuacc

SEQ ID NO: 38500 - RNA, 21 nt, artificial
  Chemically synthesized
aaaaauaaaggccuuauuuug

SEQ ID NO: 38501 - RNA, 21 nt, artificial
  Chemically synthesized
ucgaaacugacuggaaacuuc

SEQ ID NO: 38502 - RNA, 21 nt, artificial
  Chemically synthesized
cacccggauuacaaguaccag

SEQ ID NO: 38503 - RNA, 21 nt, artificial
  Chemically synthesized
uauuuuuccaacagcuaaacu

SEQ ID NO: 38504 - RNA, 21 nt, artificial
  Chemically synthesized
uuccaacagcuaaacuacucu

SEQ ID NO: 38505 - RNA, 21 nt, artificial
  Chemically synthesized
uuuuccaacagcuaaacuacu

SEQ ID NO: 38506 - RNA, 21 nt, artificial
  Chemically synthesized
gaucagugugcuaaaucucuc

SEQ ID NO: 38507 - RNA, 21 nt, artificial
  Chemically synthesized
auggucaucuguuguuaaauu

SEQ ID NO: 38508 - RNA, 21 nt, artificial
  Chemically synthesized
caugaccuauccaagcgcauu

SEQ ID NO: 38509 - RNA, 21 nt, artificial
  Chemically synthesized
cuuuuuaaaaagauacuucug

SEQ ID NO: 38510 - RNA, 21 nt, artificial
  Chemically synthesized
uguuaugugaucaguuuuggg

SEQ ID NO: 38511 - RNA, 21 nt, artificial
  Chemically synthesized
cuuuuuucuuuguuguuuuug

SEQ ID NO: 38512 - RNA, 21 nt, artificial
  Chemically synthesized
uagguaaaagcuuugguuugu

SEQ ID NO: 38513 - RNA, 21 nt, artificial
  Chemically synthesized
ucuuccuuaaagacauuuaag

SEQ ID NO: 38514 - RNA, 21 nt, artificial
  Chemically synthesized
gugaucagugugcuaaaucuc

SEQ ID NO: 38515 - RNA, 21 nt, artificial
  Chemically synthesized
auuaaaagcaaguuucuuugu

SEQ ID NO: 38516 - RNA, 21 nt, artificial
  Chemically synthesized
guaauuaaagaaaaaaguccu

SEQ ID NO: 38517 - RNA, 21 nt, artificial
  Chemically synthesized
caagcgcauuacccacuugug

SEQ ID NO: 38518 - RNA, 21 nt, artificial
  Chemically synthesized
ugcuaaaucucucugccuguu

SEQ ID NO: 38519 - RNA, 21 nt, artificial
  Chemically synthesized
aacuuuucuuugcaggaggag

SEQ ID NO: 38520 - RNA, 21 nt, artificial
  Chemically synthesized
aaaggagaugaaaucuguucu

SEQ ID NO: 38521 - RNA, 21 nt, artificial
  Chemically synthesized
gcauuuccuccugccuuugcu

SEQ ID NO: 38522 - RNA, 21 nt, artificial
  Chemically synthesized
caugaacgccuucauggugug

SEQ ID NO: 38523 - RNA, 21 nt, artificial
  Chemically synthesized
uuucuuuguuguuuuuguuga

SEQ ID NO: 38524 - RNA, 21 nt, artificial
  Chemically synthesized
uaugggaguaaacaauagucu

SEQ ID NO: 38525 - RNA, 21 nt, artificial
  Chemically synthesized
aaccagaguauuuuuguacag

SEQ ID NO: 38526 - RNA, 21 nt, artificial
  Chemically synthesized
caacaucgagaccuucgaugu

SEQ ID NO: 38527 - RNA, 21 nt, artificial
  Chemically synthesized
uaguguaucacugagucauuu

SEQ ID NO: 38528 - RNA, 21 nt, artificial
  Chemically synthesized
cuauccaagcgcauuacccac

SEQ ID NO: 38529 - RNA, 21 nt, artificial
  Chemically synthesized
acuucuguaacuuaagaaacc

SEQ ID NO: 38530 - RNA, 21 nt, artificial
  Chemically synthesized
aaacaccuugagccuuaaaac

SEQ ID NO: 38531 - RNA, 21 nt, artificial
  Chemically synthesized
uuugucuuuagguaaaagcuu

SEQ ID NO: 38532 - RNA, 21 nt, artificial
  Chemically synthesized
ucugugaggaauauucucuau

SEQ ID NO: 38533 - RNA, 21 nt, artificial
  Chemically synthesized
uugcaaauguaguguaucacu

SEQ ID NO: 38534 - RNA, 21 nt, artificial
  Chemically synthesized
uuguccaucccuuuuuucuuu

SEQ ID NO: 38535 - RNA, 21 nt, artificial
  Chemically synthesized
acgaguuugaccaguaccugc

SEQ ID NO: 38536 - RNA, 21 nt, artificial
  Chemically synthesized
cuuuuuuuguauaaaugagag

SEQ ID NO: 38537 - RNA, 21 nt, artificial
  Chemically synthesized
gaccacccggauuacaaguac

SEQ ID NO: 38538 - RNA, 21 nt, artificial
  Chemically synthesized
aucuucucuuggagugaggga

SEQ ID NO: 38539 - RNA, 21 nt, artificial
  Chemically synthesized
auuugcacucuuuuagugcau

SEQ ID NO: 38540 - RNA, 21 nt, artificial
  Chemically synthesized
gaugucaacgaguuugaccag

SEQ ID NO: 38541 - RNA, 21 nt, artificial
  Chemically synthesized
aacccucuucagagcaagcgu

SEQ ID NO: 38542 - RNA, 21 nt, artificial
  Chemically synthesized
gagagauugcaaauguagugu

SEQ ID NO: 38543 - RNA, 21 nt, artificial
  Chemically synthesized
aucugaagaaggagagcgagg

SEQ ID NO: 38544 - RNA, 21 nt, artificial
  Chemically synthesized
guccucugugaggaauauucu

SEQ ID NO: 38545 - RNA, 21 nt, artificial
  Chemically synthesized
auccaagcgcauuacccacuu

SEQ ID NO: 38546 - RNA, 21 nt, artificial
  Chemically synthesized
caaaccuuuuguucucuccgu

SEQ ID NO: 38547 - RNA, 21 nt, artificial
  Chemically synthesized
uuauuuauuuuguaaggagag

SEQ ID NO: 38548 - RNA, 21 nt, artificial
  Chemically synthesized
uauuuugcaauuaugggagua

SEQ ID NO: 38549 - RNA, 21 nt, artificial
  Chemically synthesized
aggcuuugcgauuuaaggagg

SEQ ID NO: 38550 - RNA, 21 nt, artificial
  Chemically synthesized
uucuguauaaaagcagaucuu

SEQ ID NO: 38551 - RNA, 21 nt, artificial
  Chemically synthesized
agagaggaccaaccagaauuc

SEQ ID NO: 38552 - RNA, 21 nt, artificial
  Chemically synthesized
uaaagacauuuaagcuaaagg

SEQ ID NO: 38553 - RNA, 21 nt, artificial
  Chemically synthesized
augaagaugaccgacgagcag

SEQ ID NO: 38554 - RNA, 21 nt, artificial
  Chemically synthesized
cuuaauuccucaggcuuugcg

SEQ ID NO: 38555 - RNA, 21 nt, artificial
  Chemically synthesized
aaaggguauggucaucuguug

SEQ ID NO: 38556 - RNA, 21 nt, artificial
  Chemically synthesized
cccuagauuuguauaaaugcc

SEQ ID NO: 38557 - RNA, 21 nt, artificial
  Chemically synthesized
uuggagcuuuccucaaagggu

SEQ ID NO: 38558 - RNA, 21 nt, artificial
  Chemically synthesized
guauuccucacccuagauuug

SEQ ID NO: 38559 - RNA, 21 nt, artificial
  Chemically synthesized
acaucgagaccuucgauguca

SEQ ID NO: 38560 - RNA, 21 nt, artificial
  Chemically synthesized
ugaaaacaaacuggaaacuug

SEQ ID NO: 38561 - RNA, 21 nt, artificial
  Chemically synthesized
gagaggaccaaccagaauucc

SEQ ID NO: 38562 - RNA, 21 nt, artificial
  Chemically synthesized
uauuuugucuuuagguaaaag

SEQ ID NO: 38563 - RNA, 21 nt, artificial
  Chemically synthesized
aagcucuggagacuucugaac

SEQ ID NO: 38564 - RNA, 21 nt, artificial
  Chemically synthesized
uguaugauucauuaccauuuu

SEQ ID NO: 38565 - RNA, 21 nt, artificial
  Chemically synthesized
ucuguauaaaagcagaucuuu

SEQ ID NO: 38566 - RNA, 21 nt, artificial
  Chemically synthesized
acauuuaaaaacagaauugug

SEQ ID NO: 38567 - RNA, 21 nt, artificial
  Chemically synthesized
caucuccaacaucgagaccuu

SEQ ID NO: 38568 - RNA, 21 nt, artificial
  Chemically synthesized
accuugagccuuaaaacggug

SEQ ID NO: 38569 - RNA, 21 nt, artificial
  Chemically synthesized
uuuguccaucccuuuuuucuu

SEQ ID NO: 38570 - RNA, 21 nt, artificial
  Chemically synthesized
uguucguguuuuguuuguuuc

SEQ ID NO: 38571 - RNA, 21 nt, artificial
  Chemically synthesized
uguuuuguuuguuucacuugu

SEQ ID NO: 38572 - RNA, 21 nt, artificial
  Chemically synthesized
aucgagaccuucgaugucaac

SEQ ID NO: 38573 - RNA, 21 nt, artificial
  Chemically synthesized
gauucauuaccauuuugaggg

SEQ ID NO: 38574 - RNA, 21 nt, artificial
  Chemically synthesized
ucaacgaguuugaccaguacc

SEQ ID NO: 38575 - RNA, 21 nt, artificial
  Chemically synthesized
gcuuuccucaaaggguauggu

SEQ ID NO: 38576 - RNA, 21 nt, artificial
  Chemically synthesized
gucaacgaguuugaccaguac

SEQ ID NO: 38577 - RNA, 21 nt, artificial
  Chemically synthesized
uugcacucuuuuagugcauuu

SEQ ID NO: 38578 - RNA, 21 nt, artificial
  Chemically synthesized
aguagaauaaaaucuuaaagc

SEQ ID NO: 38579 - RNA, 21 nt, artificial
  Chemically synthesized
agcgacgucaucuccaacauc

SEQ ID NO: 38580 - RNA, 21 nt, artificial
  Chemically synthesized
uuagguaaaagcuuugguuug

SEQ ID NO: 38581 - RNA, 21 nt, artificial
  Chemically synthesized
cuugagccuuaaaacggugcu

SEQ ID NO: 38582 - RNA, 21 nt, artificial
  Chemically synthesized
agaaacuggacuuuuuaaacc

SEQ ID NO: 38583 - RNA, 21 nt, artificial
  Chemically synthesized
auccauauuucucuacaucuu

SEQ ID NO: 38584 - RNA, 21 nt, artificial
  Chemically synthesized
gucaucuguuguuaaauuaug

SEQ ID NO: 38585 - RNA, 21 nt, artificial
  Chemically synthesized
uuuugucuuuagguaaaagcu

SEQ ID NO: 38586 - RNA, 21 nt, artificial
  Chemically synthesized
uucuuugcaggaggagaagag

SEQ ID NO: 38587 - RNA, 21 nt, artificial
  Chemically synthesized
aaaauaaccgaagaaagagag

SEQ ID NO: 38588 - RNA, 21 nt, artificial
  Chemically synthesized
cuuuccucaaaggguaugguc

SEQ ID NO: 38589 - RNA, 21 nt, artificial
  Chemically synthesized
aagcuaaaggcaacucguacc

SEQ ID NO: 38590 - RNA, 21 nt, artificial
  Chemically synthesized
guugaaaacaaacuggaaacu

SEQ ID NO: 38591 - RNA, 21 nt, artificial
  Chemically synthesized
cugcugggaaacauuugcacu

SEQ ID NO: 38592 - RNA, 21 nt, artificial
  Chemically synthesized
ucuguaacuuaagaaaccugg

SEQ ID NO: 38593 - RNA, 21 nt, artificial
  Chemically synthesized
gccuuaaaaaaaaauaaaggc

SEQ ID NO: 38594 - RNA, 21 nt, artificial
  Chemically synthesized
aaauagguuguuggagcuuuc

SEQ ID NO: 38595 - RNA, 21 nt, artificial
  Chemically synthesized
uucucuccgugaaacuuaccu

SEQ ID NO: 38596 - RNA, 21 nt, artificial
  Chemically synthesized
uaaaauagguuguuggagcuu

SEQ ID NO: 38597 - RNA, 21 nt, artificial
  Chemically synthesized
acccggauuacaaguaccagc

SEQ ID NO: 38598 - RNA, 21 nt, artificial
  Chemically synthesized
uccaacagcuaaacuacucuu

SEQ ID NO: 38599 - RNA, 21 nt, artificial
  Chemically synthesized
aacugacuggaaacuucagug

SEQ ID NO: 38600 - RNA, 21 nt, artificial
  Chemically synthesized
aaaguccucugugaggaauau

SEQ ID NO: 38601 - RNA, 21 nt, artificial
  Chemically synthesized
gaucugaagaaggagagcgag

SEQ ID NO: 38602 - RNA, 21 nt, artificial
  Chemically synthesized
ccaucccuuuuuucuuuguug

SEQ ID NO: 38603 - RNA, 21 nt, artificial
  Chemically synthesized
ugcucuuauuuuuccaacagc

SEQ ID NO: 38604 - RNA, 21 nt, artificial
  Chemically synthesized
cuuuaaaauagguuguuggag

SEQ ID NO: 38605 - RNA, 21 nt, artificial
  Chemically synthesized
aaaaaguccucugugaggaau

SEQ ID NO: 38606 - RNA, 21 nt, artificial
  Chemically synthesized
uucuucuuccuuaaagacauu

SEQ ID NO: 38607 - RNA, 21 nt, artificial
  Chemically synthesized
auauuuuuaguauguacugug

SEQ ID NO: 38608 - RNA, 21 nt, artificial
  Chemically synthesized
uuguacagauuugcuuucucu

SEQ ID NO: 38609 - RNA, 21 nt, artificial
  Chemically synthesized
ucuccaacaucgagaccuucg

SEQ ID NO: 38610 - RNA, 21 nt, artificial
  Chemically synthesized
cuuaguugaacagugugcccu

SEQ ID NO: 38611 - RNA, 21 nt, artificial
  Chemically synthesized
ugaccuauccaagcgcauuac

SEQ ID NO: 38612 - RNA, 21 nt, artificial
  Chemically synthesized
aacagugugcccuagcuuuuc

SEQ ID NO: 38613 - RNA, 21 nt, artificial
  Chemically synthesized
caaacaugaccuauccaagcg

SEQ ID NO: 38614 - RNA, 21 nt, artificial
  Chemically synthesized
ugagagauugcaaauguagug

SEQ ID NO: 38615 - RNA, 21 nt, artificial
  Chemically synthesized
ugccuuaaaaaaaaauaaagg

SEQ ID NO: 38616 - RNA, 21 nt, artificial
  Chemically synthesized
cucuacuccaccuucaccuac

SEQ ID NO: 38617 - RNA, 21 nt, artificial
  Chemically synthesized
uuuguauaaaugagagauugc

SEQ ID NO: 38618 - RNA, 21 nt, artificial
  Chemically synthesized
uauuuuuguacagauuugcuu

SEQ ID NO: 38619 - RNA, 21 nt, artificial
  Chemically synthesized
aaggagaugaaaucuguucug

SEQ ID NO: 38620 - RNA, 21 nt, artificial
  Chemically synthesized
cucaaaggguauggucaucug

SEQ ID NO: 38621 - RNA, 21 nt, artificial
  Chemically synthesized
uccaucccuuuuuucuuuguu

SEQ ID NO: 38622 - RNA, 21 nt, artificial
  Chemically synthesized
auuuauuuuguaaggagaggu

SEQ ID NO: 38623 - RNA, 21 nt, artificial
  Chemically synthesized
ucacaguacgacuacaccgac

SEQ ID NO: 38624 - RNA, 21 nt, artificial
  Chemically synthesized
augucaacgaguuugaccagu

SEQ ID NO: 38625 - RNA, 21 nt, artificial
  Chemically synthesized
uauguucuuaacuguaaccag

SEQ ID NO: 38626 - RNA, 21 nt, artificial
  Chemically synthesized
cugccuuugcuuguucacugc

SEQ ID NO: 38627 - RNA, 21 nt, artificial
  Chemically synthesized
uacagauuugcuuucucuuac

SEQ ID NO: 38628 - RNA, 21 nt, artificial
  Chemically synthesized
guaaacaauagucuagagaag

SEQ ID NO: 38629 - RNA, 21 nt, artificial
  Chemically synthesized
uccaccuucaccuacaugaac

SEQ ID NO: 38630 - RNA, 21 nt, artificial
  Chemically synthesized
uaaagaaaaaaguccucugug

SEQ ID NO: 38631 - RNA, 21 nt, artificial
  Chemically synthesized
uaucacugagucauuugcagu

SEQ ID NO: 38632 - RNA, 21 nt, artificial
  Chemically synthesized
uuuucuugcaaccagaguauu

SEQ ID NO: 38633 - RNA, 21 nt, artificial
  Chemically synthesized
uuauacagaaauugaaggaug

SEQ ID NO: 38634 - RNA, 21 nt, artificial
  Chemically synthesized
uuaagauuuuauucuacugac

SEQ ID NO: 38635 - RNA, 21 nt, artificial
  Chemically synthesized
uucuuaaguuacagaaguauc

SEQ ID NO: 38636 - RNA, 21 nt, artificial
  Chemically synthesized
uuuuaauuaaaaccucuccuu

SEQ ID NO: 38637 - RNA, 21 nt, artificial
  Chemically synthesized
uuuaauuaaaaccucuccuua

SEQ ID NO: 38638 - RNA, 21 nt, artificial
  Chemically synthesized
uuuaaauguuaauacaacagg

SEQ ID NO: 38639 - RNA, 21 nt, artificial
  Chemically synthesized
uauauaugauaaagcuuacca

SEQ ID NO: 38640 - RNA, 21 nt, artificial
  Chemically synthesized
uuaaaauagagaauauuccuc

SEQ ID NO: 38641 - RNA, 21 nt, artificial
  Chemically synthesized
uguuuuaauuaaaaccucucc

SEQ ID NO: 38642 - RNA, 21 nt, artificial
  Chemically synthesized
uaaaauagagaauauuccuca

SEQ ID NO: 38643 - RNA, 21 nt, artificial
  Chemically synthesized
uuaauuaaaaccucuccuuac

SEQ ID NO: 38644 - RNA, 21 nt, artificial
  Chemically synthesized
uauuguuuacucccauaauug

SEQ ID NO: 38645 - RNA, 21 nt, artificial
  Chemically synthesized
uuguuuuaauuaaaaccucuc

SEQ ID NO: 38646 - RNA, 21 nt, artificial
  Chemically synthesized
uuuagcuuaaaugucuuuaag

SEQ ID NO: 38647 - RNA, 21 nt, artificial
  Chemically synthesized
uuuauuuuuuuuuaaggcagc

SEQ ID NO: 38648 - RNA, 21 nt, artificial
  Chemically synthesized
uuuuaaagaagguaaaauugg

SEQ ID NO: 38649 - RNA, 21 nt, artificial
  Chemically synthesized
auuaugagugcuuuaagauuu

SEQ ID NO: 38650 - RNA, 21 nt, artificial
  Chemically synthesized
uuaaauguuaauacaacagga

SEQ ID NO: 38651 - RNA, 21 nt, artificial
  Chemically synthesized
auaauuuaacaacagaugacc

SEQ ID NO: 38652 - RNA, 21 nt, artificial
  Chemically synthesized
uuuucaacaaaaacaacaaag

SEQ ID NO: 38653 - RNA, 21 nt, artificial
  Chemically synthesized
uaucuuuuuaaaaagaucugc

SEQ ID NO: 38654 - RNA, 21 nt, artificial
  Chemically synthesized
uuuaccuaaagacaaaauaug

SEQ ID NO: 38655 - RNA, 21 nt, artificial
  Chemically synthesized
uaaguuacagaaguaucuuuu

SEQ ID NO: 38656 - RNA, 21 nt, artificial
  Chemically synthesized
uuuuauacagaaauugaagga

SEQ ID NO: 38657 - RNA, 21 nt, artificial
  Chemically synthesized
uacauuugcaaucucucauuu

SEQ ID NO: 38658 - RNA, 21 nt, artificial
  Chemically synthesized
uuuguuuucaacaaaaacaac

SEQ ID NO: 38659 - RNA, 21 nt, artificial
  Chemically synthesized
ucuuucuucgguuauuuuuag

SEQ ID NO: 38660 - RNA, 21 nt, artificial
  Chemically synthesized
aucuuuuuaaaaagaucugcu

SEQ ID NO: 38661 - RNA, 21 nt, artificial
  Chemically synthesized
uaauuuaacaacagaugacca

SEQ ID NO: 38662 - RNA, 21 nt, artificial
  Chemically synthesized
uauaugauaaagcuuaccaaa

SEQ ID NO: 38663 - RNA, 21 nt, artificial
  Chemically synthesized
uuagcuuaaaugucuuuaagg

SEQ ID NO: 38664 - RNA, 21 nt, artificial
  Chemically synthesized
uuuagcuguuggaaaaauaag

SEQ ID NO: 38665 - RNA, 21 nt, artificial
  Chemically synthesized
uauuuuuuuuuaaggcagcuc

SEQ ID NO: 38666 - RNA, 21 nt, artificial
  Chemically synthesized
uuuuauucuacugacuucuaa

SEQ ID NO: 38667 - RNA, 21 nt, artificial
  Chemically synthesized
uaauuaagauuaaggucuguc

SEQ ID NO: 38668 - RNA, 21 nt, artificial
  Chemically synthesized
auaauuacaaaguccaaacag

SEQ ID NO: 38669 - RNA, 21 nt, artificial
  Chemically synthesized
uuaaguuacagaaguaucuuu

SEQ ID NO: 38670 - RNA, 21 nt, artificial
  Chemically synthesized
ucugguugcaagaaaagcuag

SEQ ID NO: 38671 - RNA, 21 nt, artificial
  Chemically synthesized
uuugcaaucucucauuuauac

SEQ ID NO: 38672 - RNA, 21 nt, artificial
  Chemically synthesized
uuaccuaaagacaaaauauga

SEQ ID NO: 38673 - RNA, 21 nt, artificial
  Chemically synthesized
cuaaaaauauguauaaauccc

SEQ ID NO: 38674 - RNA, 21 nt, artificial
  Chemically synthesized
uauuaugagugcuuuaagauu

SEQ ID NO: 38675 - RNA, 21 nt, artificial
  Chemically synthesized
uaugauaaagcuuaccaaaug

SEQ ID NO: 38676 - RNA, 21 nt, artificial
  Chemically synthesized
uauucuacugacuucuaaaac

SEQ ID NO: 38677 - RNA, 21 nt, artificial
  Chemically synthesized
uucuucgguuauuuuuaggau

SEQ ID NO: 38678 - RNA, 21 nt, artificial
  Chemically synthesized
uuguuuucaacaaaaacaaca

SEQ ID NO: 38679 - RNA, 21 nt, artificial
  Chemically synthesized
auaauuuuagcaaguggaaug

SEQ ID NO: 38680 - RNA, 21 nt, artificial
  Chemically synthesized
aguaauuaagauuaaggucug

SEQ ID NO: 38681 - RNA, 21 nt, artificial
  Chemically synthesized
auuuauacaaaucuaggguga

SEQ ID NO: 38682 - RNA, 21 nt, artificial
  Chemically synthesized
uucucuagacuauuguuuacu

SEQ ID NO: 38683 - RNA, 21 nt, artificial
  Chemically synthesized
guuuuaauuaaaaccucuccu

SEQ ID NO: 38684 - RNA, 21 nt, artificial
  Chemically synthesized
uuauuuuuuuuuaaggcagcu

SEQ ID NO: 38685 - RNA, 21 nt, artificial
  Chemically synthesized
auaaauaauuuuagcaagugg

SEQ ID NO: 38686 - RNA, 21 nt, artificial
  Chemically synthesized
ugaacaagcaaaggcaggagg

SEQ ID NO: 38687 - RNA, 21 nt, artificial
  Chemically synthesized
ucaaaaugguaaugaaucaua

SEQ ID NO: 38688 - RNA, 21 nt, artificial
  Chemically synthesized
aaaaagaaacaaguuuccagu

SEQ ID NO: 38689 - RNA, 21 nt, artificial
  Chemically synthesized
uaaaaagaucugcuuuuauac

SEQ ID NO: 38690 - RNA, 21 nt, artificial
  Chemically synthesized
ucuuuuuaaaaagaucugcuu

SEQ ID NO: 38691 - RNA, 21 nt, artificial
  Chemically synthesized
auuuuauucuacugacuucua

SEQ ID NO: 38692 - RNA, 21 nt, artificial
  Chemically synthesized
uaauuaaaaccucuccuuaca

SEQ ID NO: 38693 - RNA, 21 nt, artificial
  Chemically synthesized
acaaaauaugauuuaaaugcc

SEQ ID NO: 38694 - RNA, 21 nt, artificial
  Chemically synthesized
uuuuaccucuuucuuaagacu

SEQ ID NO: 38695 - RNA, 21 nt, artificial
  Chemically synthesized
uuaugagugcuuuaagauuuu

SEQ ID NO: 38696 - RNA, 21 nt, artificial
  Chemically synthesized
ucuuaaguuacagaaguaucu

SEQ ID NO: 38697 - RNA, 21 nt, artificial
  Chemically synthesized
auauauaugauaaagcuuacc

SEQ ID NO: 38698 - RNA, 21 nt, artificial
  Chemically synthesized
aacagaugaccauacccuuug

SEQ ID NO: 38699 - RNA, 21 nt, artificial
  Chemically synthesized
uaagauuuuauucuacugacu

SEQ ID NO: 38700 - RNA, 21 nt, artificial
  Chemically synthesized
aaaaacaacaaagaaaaaagg

SEQ ID NO: 38701 - RNA, 21 nt, artificial
  Chemically synthesized
acuuuuuucuuuaauuacugc

SEQ ID NO: 38702 - RNA, 21 nt, artificial
  Chemically synthesized
uuuauucuacugacuucuaaa

SEQ ID NO: 38703 - RNA, 21 nt, artificial
  Chemically synthesized
accguuuuaaggcucaaggug

SEQ ID NO: 38704 - RNA, 21 nt, artificial
  Chemically synthesized
uuaaaaccucuccuuacaaaa

SEQ ID NO: 38705 - RNA, 21 nt, artificial
  Chemically synthesized
uuagcuguuggaaaaauaaga

SEQ ID NO: 38706 - RNA, 21 nt, artificial
  Chemically synthesized
aauuuggguacgaguugccuu

SEQ ID NO: 38707 - RNA, 21 nt, artificial
  Chemically synthesized
uuuauacagaaauugaaggau

SEQ ID NO: 38708 - RNA, 21 nt, artificial
  Chemically synthesized
aaauaauuacaaaguccaaac

SEQ ID NO: 38709 - RNA, 21 nt, artificial
  Chemically synthesized
auuaaaaccucuccuuacaaa

SEQ ID NO: 38710 - RNA, 21 nt, artificial
  Chemically synthesized
aaaacaacaaagaaaaaaggg

SEQ ID NO: 38711 - RNA, 21 nt, artificial
  Chemically synthesized
aacauaauuuaacaacagaug

SEQ ID NO: 38712 - RNA, 21 nt, artificial
  Chemically synthesized
acaaaaaaagaaacaaguuuc

SEQ ID NO: 38713 - RNA, 21 nt, artificial
  Chemically synthesized
uugcaaaauaaggccuuuauu

SEQ ID NO: 38714 - RNA, 21 nt, artificial
  Chemically synthesized
cuuaaguuacagaaguaucuu

SEQ ID NO: 38715 - RNA, 21 nt, artificial
  Chemically synthesized
cuuuuauacagaaauugaagg

SEQ ID NO: 38716 - RNA, 21 nt, artificial
  Chemically synthesized
auauaugauaaagcuuaccaa

SEQ ID NO: 38717 - RNA, 21 nt, artificial
  Chemically synthesized
ucugcuuuuauacagaaauug

SEQ ID NO: 38718 - RNA, 21 nt, artificial
  Chemically synthesized
ugcaaaauaaggccuuuauuu

SEQ ID NO: 38719 - RNA, 21 nt, artificial
  Chemically synthesized
uguacaaaaauacucugguug

SEQ ID NO: 38720 - RNA, 21 nt, artificial
  Chemically synthesized
cuuuauuuuuuuuuaaggcag

SEQ ID NO: 38721 - RNA, 21 nt, artificial
  Chemically synthesized
auaauugcaaaauaaggccuu

SEQ ID NO: 38722 - RNA, 21 nt, artificial
  Chemically synthesized
ucucuuucuucgguuauuuuu

SEQ ID NO: 38723 - RNA, 21 nt, artificial
  Chemically synthesized
uuucuucgguuauuuuuagga

SEQ ID NO: 38724 - RNA, 21 nt, artificial
  Chemically synthesized
uaaauaauuuuagcaagugga

SEQ ID NO: 38725 - RNA, 21 nt, artificial
  Chemically synthesized
aaaagaucugcuuuuauacag

SEQ ID NO: 38726 - RNA, 21 nt, artificial
  Chemically synthesized
ugcuuuaagauuuuauucuac

SEQ ID NO: 38727 - RNA, 21 nt, artificial
  Chemically synthesized
uugcaaucucucauuuauaca

SEQ ID NO: 38728 - RNA, 21 nt, artificial
  Chemically synthesized
aacaaguuuccaguuuguuuu

SEQ ID NO: 38729 - RNA, 21 nt, artificial
  Chemically synthesized
guuuaaaaaguccaguuucuc

SEQ ID NO: 38730 - RNA, 21 nt, artificial
  Chemically synthesized
aauuaagauuaaggucuguca

SEQ ID NO: 38731 - RNA, 21 nt, artificial
  Chemically synthesized
aagauuuuauucuacugacuu

SEQ ID NO: 38732 - RNA, 21 nt, artificial
  Chemically synthesized
uucauguaggugaagguggag

SEQ ID NO: 38733 - RNA, 21 nt, artificial
  Chemically synthesized
uuucuuaaguuacagaaguau

SEQ ID NO: 38734 - RNA, 21 nt, artificial
  Chemically synthesized
aaucuguacaaaaauacucug

SEQ ID NO: 38735 - RNA, 21 nt, artificial
  Chemically synthesized
ucuuuaaggaagaagaagaag

SEQ ID NO: 38736 - RNA, 21 nt, artificial
  Chemically synthesized
uaacaacagaugaccauaccc

SEQ ID NO: 38737 - RNA, 21 nt, artificial
  Chemically synthesized
uaauuuuagcaaguggaaugu

SEQ ID NO: 38738 - RNA, 21 nt, artificial
  Chemically synthesized
agugaaacaaacaaaacacga

SEQ ID NO: 38739 - RNA, 21 nt, artificial
  Chemically synthesized
uaaaugucuuuaaggaagaag

SEQ ID NO: 38740 - RNA, 21 nt, artificial
  Chemically synthesized
aaguuuccagucaguuucgag

SEQ ID NO: 38741 - RNA, 21 nt, artificial
  Chemically synthesized
gucaguuucgagcuccgcuuu

SEQ ID NO: 38742 - RNA, 21 nt, artificial
  Chemically synthesized
aaaucuguacaaaaauacucu

SEQ ID NO: 38743 - RNA, 21 nt, artificial
  Chemically synthesized
aaaaaagaaacaaguuuccag

SEQ ID NO: 38744 - RNA, 21 nt, artificial
  Chemically synthesized
ugauaaagcuuaccaaaugcu

SEQ ID NO: 38745 - RNA, 21 nt, artificial
  Chemically synthesized
cauaauugcaaaauaaggccu

SEQ ID NO: 38746 - RNA, 21 nt, artificial
  Chemically synthesized
gcuuuuauacagaaauugaag

SEQ ID NO: 38747 - RNA, 21 nt, artificial
  Chemically synthesized
cuuuuuucuuuaauuacugcu

SEQ ID NO: 38748 - RNA, 21 nt, artificial
  Chemically synthesized
cuuuuuaaaaagaucugcuuu

SEQ ID NO: 38749 - RNA, 21 nt, artificial
  Chemically synthesized
accuaaagacaaaauaugauu

SEQ ID NO: 38750 - RNA, 21 nt, artificial
  Chemically synthesized
caguaauuaagauuaaggucu

SEQ ID NO: 38751 - RNA, 21 nt, artificial
  Chemically synthesized
uaugagugcuuuaagauuuua

SEQ ID NO: 38752 - RNA, 21 nt, artificial
  Chemically synthesized
uguucaacuaagaguaguuua

SEQ ID NO: 38753 - RNA, 21 nt, artificial
  Chemically synthesized
uagcuuaaaugucuuuaagga

SEQ ID NO: 38754 - RNA, 21 nt, artificial
  Chemically synthesized
agugcuuuaagauuuuauucu

SEQ ID NO: 38755 - RNA, 21 nt, artificial
  Chemically synthesized
auaaggcagcccaaaggucug

SEQ ID NO: 38756 - RNA, 21 nt, artificial
  Chemically synthesized
acaaaaaggcauuuauacaaa

SEQ ID NO: 38757 - RNA, 21 nt, artificial
  Chemically synthesized
auauuaugagugcuuuaagau

SEQ ID NO: 38758 - RNA, 21 nt, artificial
  Chemically synthesized
caaaaugguaaugaaucauac

SEQ ID NO: 38759 - RNA, 21 nt, artificial
  Chemically synthesized
ugguugcaagaaaagcuaggg

SEQ ID NO: 38760 - RNA, 21 nt, artificial
  Chemically synthesized
gagugcuuuaagauuuuauuc

SEQ ID NO: 38761 - RNA, 21 nt, artificial
  Chemically synthesized
acuuguaauccgggugguccu

SEQ ID NO: 38762 - RNA, 21 nt, artificial
  Chemically synthesized
aauuaaaaccucuccuuacaa

SEQ ID NO: 38763 - RNA, 21 nt, artificial
  Chemically synthesized
uguuuacucccauaauugcaa

SEQ ID NO: 38764 - RNA, 21 nt, artificial
  Chemically synthesized
aaaugguaaugaaucauacac

SEQ ID NO: 38765 - RNA, 21 nt, artificial
  Chemically synthesized
auuuaacaacagaugaccaua

SEQ ID NO: 38766 - RNA, 21 nt, artificial
  Chemically synthesized
augagugcuuuaagauuuuau

SEQ ID NO: 38767 - RNA, 21 nt, artificial
  Chemically synthesized
acaacagaugaccauacccuu

SEQ ID NO: 38768 - RNA, 21 nt, artificial
  Chemically synthesized
agcaauccucaaacucucuag

SEQ ID NO: 38769 - RNA, 21 nt, artificial
  Chemically synthesized
aaaaaaagaaacaaguuucca

SEQ ID NO: 38770 - RNA, 21 nt, artificial
  Chemically synthesized
uaguuuagcuguuggaaaaau

SEQ ID NO: 38771 - RNA, 21 nt, artificial
  Chemically synthesized
ugagugcuuuaagauuuuauu

SEQ ID NO: 38772 - RNA, 21 nt, artificial
  Chemically synthesized
uucaacaaaaacaacaaagaa

SEQ ID NO: 38773 - RNA, 21 nt, artificial
  Chemically synthesized
uuuaaggaagaagaagaagaa

SEQ ID NO: 38774 - RNA, 21 nt, artificial
  Chemically synthesized
gacuuuuuucuuuaauuacug

SEQ ID NO: 38775 - RNA, 21 nt, artificial
  Chemically synthesized
uuauucuacugacuucuaaaa

SEQ ID NO: 38776 - RNA, 21 nt, artificial
  Chemically synthesized
aagguguuuuucucuucuuua

SEQ ID NO: 38777 - RNA, 21 nt, artificial
  Chemically synthesized
agggaauucugguugguccuc

SEQ ID NO: 38778 - RNA, 21 nt, artificial
  Chemically synthesized
aagaacauaauuuaacaacag

SEQ ID NO: 38779 - RNA, 21 nt, artificial
  Chemically synthesized
ugaggaauuaagcaaaguuaa

SEQ ID NO: 38780 - RNA, 21 nt, artificial
  Chemically synthesized
auacaaaucuagggugaggaa

SEQ ID NO: 38781 - RNA, 21 nt, artificial
  Chemically synthesized
cuguaguaggagcuggaguuc

SEQ ID NO: 38782 - RNA, 21 nt, artificial
  Chemically synthesized
aagguuaacugcugguguucu

SEQ ID NO: 38783 - RNA, 21 nt, artificial
  Chemically synthesized
aaaauagagaauauuccucac

SEQ ID NO: 38784 - RNA, 21 nt, artificial
  Chemically synthesized
auaugauaaagcuuaccaaau

SEQ ID NO: 38785 - RNA, 21 nt, artificial
  Chemically synthesized
uuggaaaaauaagagcauuua

SEQ ID NO: 38786 - RNA, 21 nt, artificial
  Chemically synthesized
caaaugacucagugauacacu

SEQ ID NO: 38787 - RNA, 21 nt, artificial
  Chemically synthesized
aacaacaaagaaaaaagggau

SEQ ID NO: 38788 - RNA, 21 nt, artificial
  Chemically synthesized
agguuucuuaaguuacagaag

SEQ ID NO: 38789 - RNA, 21 nt, artificial
  Chemically synthesized
agguuaacugcugguguucug

SEQ ID NO: 38790 - RNA, 21 nt, artificial
  Chemically synthesized
uccaacaaccuauuuuaaaga

SEQ ID NO: 38791 - RNA, 21 nt, artificial
  Chemically synthesized
uccaguuuguuuucaacaaaa

SEQ ID NO: 38792 - RNA, 21 nt, artificial
  Chemically synthesized
aaaaagaucugcuuuuauaca

SEQ ID NO: 38793 - RNA, 21 nt, artificial
  Chemically synthesized
augucuuuaaggaagaagaag

SEQ ID NO: 38794 - RNA, 21 nt, artificial
  Chemically synthesized
aggaaagcuccaacaaccuau

SEQ ID NO: 38795 - RNA, 21 nt, artificial
  Chemically synthesized
caaagcuuuuaccuaaagaca

SEQ ID NO: 38796 - RNA, 21 nt, artificial
  Chemically synthesized
uguuggaaaaauaagagcauu

SEQ ID NO: 38797 - RNA, 21 nt, artificial
  Chemically synthesized
auuacaaaguccaaacaggca

SEQ ID NO: 38798 - RNA, 21 nt, artificial
  Chemically synthesized
uuuccaguuuguuuucaacaa

SEQ ID NO: 38799 - RNA, 21 nt, artificial
  Chemically synthesized
ugcugaaacauucccagaaca

SEQ ID NO: 38800 - RNA, 21 nt, artificial
  Chemically synthesized
gcauuuauacaaaucuagggu

SEQ ID NO: 38801 - RNA, 21 nt, artificial
  Chemically synthesized
uuccaguuuguuuucaacaaa

SEQ ID NO: 38802 - RNA, 21 nt, artificial
  Chemically synthesized
uguucugagaggcacagguga

SEQ ID NO: 38803 - RNA, 21 nt, artificial
  Chemically synthesized
aacuaagaguaguuuagcugu

SEQ ID NO: 38804 - RNA, 21 nt, artificial
  Chemically synthesized
ucgucggucaucuucaugaag

SEQ ID NO: 38805 - RNA, 21 nt, artificial
  Chemically synthesized
uacaaagaaacuugcuuuuaa

SEQ ID NO: 38806 - RNA, 21 nt, artificial
  Chemically synthesized
aauaauuacaaaguccaaaca

SEQ ID NO: 38807 - RNA, 21 nt, artificial
  Chemically synthesized
gggaauucugguugguccucu

SEQ ID NO: 38808 - RNA, 21 nt, artificial
  Chemically synthesized
agcuguuggaaaaauaagagc

SEQ ID NO: 38809 - RNA, 21 nt, artificial
  Chemically synthesized
aagggaauucugguugguccu

SEQ ID NO: 38810 - RNA, 21 nt, artificial
  Chemically synthesized
ugcucugaagaggguuuaaaa

SEQ ID NO: 38811 - RNA, 21 nt, artificial
  Chemically synthesized
acaaaguccaaacaggcagag

SEQ ID NO: 38812 - RNA, 21 nt, artificial
  Chemically synthesized
cauacccuuugaggaaagcuc

SEQ ID NO: 38813 - RNA, 21 nt, artificial
  Chemically synthesized
agauuuuauucuacugacuuc

SEQ ID NO: 38814 - RNA, 21 nt, artificial
  Chemically synthesized
cucugguugcaagaaaagcua

SEQ ID NO: 38815 - RNA, 21 nt, artificial
  Chemically synthesized
agccugaggaauuaagcaaag

SEQ ID NO: 38816 - RNA, 21 nt, artificial
  Chemically synthesized
cauauuaugagugcuuuaaga

SEQ ID NO: 38817 - RNA, 21 nt, artificial
  Chemically synthesized
cccuuugaggaaagcuccaac

SEQ ID NO: 38818 - RNA, 21 nt, artificial
  Chemically synthesized
aaaucuagggugaggaauaca

SEQ ID NO: 38819 - RNA, 21 nt, artificial
  Chemically synthesized
cuagacuauuguuuacuccca

SEQ ID NO: 38820 - RNA, 21 nt, artificial
  Chemically synthesized
acauaauuuaacaacagauga

SEQ ID NO: 38821 - RNA, 21 nt, artificial
  Chemically synthesized
ucuguacaaaaauacucuggu

SEQ ID NO: 38822 - RNA, 21 nt, artificial
  Chemically synthesized
auguuucccagcagcaccguu

SEQ ID NO: 38823 - RNA, 21 nt, artificial
  Chemically synthesized
guugcaagaaaagcuagggca

SEQ ID NO: 38824 - RNA, 21 nt, artificial
  Chemically synthesized
aauaauuuuagcaaguggaau

SEQ ID NO: 38825 - RNA, 21 nt, artificial
  Chemically synthesized
cucugaagaggguuuaaaaag

SEQ ID NO: 38826 - RNA, 21 nt, artificial
  Chemically synthesized
aacaaccuauuuuaaagaagg

SEQ ID NO: 38827 - RNA, 21 nt, artificial
  Chemically synthesized
acugaaguuuccagucaguuu

SEQ ID NO: 38828 - RNA, 21 nt, artificial
  Chemically synthesized
cuuuaagauuuuauucuacug

SEQ ID NO: 38829 - RNA, 21 nt, artificial
  Chemically synthesized
aaaagaaacaaguuuccaguu

SEQ ID NO: 38830 - RNA, 21 nt, artificial
  Chemically synthesized
agcaguaauuaagauuaaggu

SEQ ID NO: 38831 - RNA, 21 nt, artificial
  Chemically synthesized
aguuucacggagagaacaaaa

SEQ ID NO: 38832 - RNA, 21 nt, artificial
  Chemically synthesized
gauuuuauucuacugacuucu

SEQ ID NO: 38833 - RNA, 21 nt, artificial
  Chemically synthesized
ccugcaaagaaaaguuuccgg

SEQ ID NO: 38834 - RNA, 21 nt, artificial
  Chemically synthesized
cuuguaauccgggugguccuu

SEQ ID NO: 38835 - RNA, 21 nt, artificial
  Chemically synthesized
acuaaaagagugcaaauguuu

SEQ ID NO: 38836 - RNA, 21 nt, artificial
  Chemically synthesized
uaaugcgcuuggauaggucau

SEQ ID NO: 38837 - RNA, 21 nt, artificial
  Chemically synthesized
aguuuguuuucaacaaaaaca

SEQ ID NO: 38838 - RNA, 21 nt, artificial
  Chemically synthesized
aaacaaguuuccaguuuguuu

SEQ ID NO: 38839 - RNA, 21 nt, artificial
  Chemically synthesized
gacaaaauaugauuuaaaugc

SEQ ID NO: 38840 - RNA, 21 nt, artificial
  Chemically synthesized
auggacaaaaaggcauuuaua

SEQ ID NO: 38841 - RNA, 21 nt, artificial
  Chemically synthesized
ugcaaauguuucccagcagca

SEQ ID NO: 38842 - RNA, 21 nt, artificial
  Chemically synthesized
auuugcaaucucucauuuaua

SEQ ID NO: 38843 - RNA, 21 nt, artificial
  Chemically synthesized
aaagcuuuuaccuaaagacaa

SEQ ID NO: 38844 - RNA, 21 nt, artificial
  Chemically synthesized
cucuuucuuaagacugcagug

SEQ ID NO: 38845 - RNA, 21 nt, artificial
  Chemically synthesized
agauuuagcacacugaucaca

SEQ ID NO: 38846 - RNA, 21 nt, artificial
  Chemically synthesized
accucuuucuuaagacugcag

SEQ ID NO: 38847 - RNA, 21 nt, artificial
  Chemically synthesized
acucugguugcaagaaaagcu

SEQ ID NO: 38848 - RNA, 21 nt, artificial
  Chemically synthesized
cuauuguuuacucccauaauu

SEQ ID NO: 38849 - RNA, 21 nt, artificial
  Chemically synthesized
aaaaccucuccuuacaaaaua

SEQ ID NO: 38850 - RNA, 21 nt, artificial
  Chemically synthesized
aaggcauuuauacaaaucuag

SEQ ID NO: 38851 - RNA, 21 nt, artificial
  Chemically synthesized
ugcaagaaaagcuagggcaca

SEQ ID NO: 38852 - RNA, 21 nt, artificial
  Chemically synthesized
aacaagugaaacaaacaaaac

SEQ ID NO: 38853 - RNA, 21 nt, artificial
  Chemically synthesized
guaguaggagcuggaguucug

SEQ ID NO: 38854 - RNA, 21 nt, artificial
  Chemically synthesized
uaaaaccucuccuuacaaaau

SEQ ID NO: 38855 - RNA, 21 nt, artificial
  Chemically synthesized
aucugcuuuuauacagaaauu

SEQ ID NO: 38856 - RNA, 21 nt, artificial
  Chemically synthesized
ugcacuaaaagagugcaaaug

SEQ ID NO: 38857 - RNA, 21 nt, artificial
  Chemically synthesized
cgucggucaucuucaugaagg

SEQ ID NO: 38858 - RNA, 21 nt, artificial
  Chemically synthesized
aggaaaaagagcaaaaguggg

SEQ ID NO: 38859 - RNA, 21 nt, artificial
  Chemically synthesized
ggguuuaaaaaguccaguuuc

SEQ ID NO: 38860 - RNA, 21 nt, artificial
  Chemically synthesized
augaccauacccuuugaggaa

SEQ ID NO: 38861 - RNA, 21 nt, artificial
  Chemically synthesized
gugcuuuaagauuuuauucua

SEQ ID NO: 38862 - RNA, 21 nt, artificial
  Chemically synthesized
cuuuuaccucuuucuuaagac

SEQ ID NO: 38863 - RNA, 21 nt, artificial
  Chemically synthesized
aaaaaagggauggacaaaaag

SEQ ID NO: 38864 - RNA, 21 nt, artificial
  Chemically synthesized
ccuuugaggaaagcuccaaca

SEQ ID NO: 38865 - RNA, 21 nt, artificial
  Chemically synthesized
auacaaagaaacuugcuuuua

SEQ ID NO: 38866 - RNA, 21 nt, artificial
  Chemically synthesized
aggaaaugcacuaaaagagug

SEQ ID NO: 38867 - RNA, 21 nt, artificial
  Chemically synthesized
aaguccaguuucucguugauu

SEQ ID NO: 38868 - RNA, 21 nt, artificial
  Chemically synthesized
ccguuuuaaggcucaaggugu

SEQ ID NO: 38869 - RNA, 21 nt, artificial
  Chemically synthesized
aagccugaggaauuaagcaaa

SEQ ID NO: 38870 - RNA, 21 nt, artificial
  Chemically synthesized
aacauucccagaacagauuuc

SEQ ID NO: 38871 - RNA, 21 nt, artificial
  Chemically synthesized
cuaagaguaguuuagcuguug

SEQ ID NO: 38872 - RNA, 21 nt, artificial
  Chemically synthesized
aaagcaauccucaaacucucu

SEQ ID NO: 38873 - RNA, 21 nt, artificial
  Chemically synthesized
cugcugaaacauucccagaac

SEQ ID NO: 38874 - RNA, 21 nt, artificial
  Chemically synthesized
cagaaaacacugcaaaugacu

SEQ ID NO: 38875 - RNA, 21 nt, artificial
  Chemically synthesized
gauaaagcuuaccaaaugcuu

SEQ ID NO: 38876 - RNA, 21 nt, artificial
  Chemically synthesized
acacuguucaacuaagaguag

SEQ ID NO: 38877 - RNA, 21 nt, artificial
  Chemically synthesized
uggaaaaauaagagcauuuaa

SEQ ID NO: 38878 - RNA, 21 nt, artificial
  Chemically synthesized
aggguuuaaaaaguccaguuu

SEQ ID NO: 38879 - RNA, 21 nt, artificial
  Chemically synthesized
cuagggugaggaauacaaaga

SEQ ID NO: 38880 - RNA, 21 nt, artificial
  Chemically synthesized
ugacuucuaaaacuguuaaua

SEQ ID NO: 38881 - RNA, 21 nt, artificial
  Chemically synthesized
acugacuucuaaaacuguuaa

SEQ ID NO: 38882 - RNA, 21 nt, artificial
  Chemically synthesized
guguuuuucucuucuuuaaaa

SEQ ID NO: 38883 - RNA, 21 nt, artificial
  Chemically synthesized
aaacacugcaaaugacucagu

SEQ ID NO: 38884 - RNA, 21 nt, artificial
  Chemically synthesized
uaaaucgcaaagccugaggaa

SEQ ID NO: 38885 - RNA, 21 nt, artificial
  Chemically synthesized
cccauaauugcaaaauaaggc

SEQ ID NO: 38886 - RNA, 21 nt, artificial
  Chemically synthesized
cagguuucuuaaguuacagaa

SEQ ID NO: 38887 - RNA, 21 nt, artificial
  Chemically synthesized
uuucaacaaaaacaacaaaga

SEQ ID NO: 38888 - RNA, 21 nt, artificial
  Chemically synthesized
agaaaaaagggauggacaaaa

SEQ ID NO: 38889 - RNA, 21 nt, artificial
  Chemically synthesized
caugcuugcauuguuuuugug

SEQ ID NO: 38890 - RNA, 21 nt, artificial
  Chemically synthesized
cugcuuuuauacagaaauuga

SEQ ID NO: 38891 - RNA, 21 nt, artificial
  Chemically synthesized
uuaaaugucuuuaaggaagaa

SEQ ID NO: 38892 - RNA, 21 nt, artificial
  Chemically synthesized
cugguugcaagaaaagcuagg

SEQ ID NO: 38893 - RNA, 21 nt, artificial
  Chemically synthesized
gauuaaggucugucagugggc

SEQ ID NO: 38894 - RNA, 21 nt, artificial
  Chemically synthesized
ccucuuucuuaagacugcagu

SEQ ID NO: 38895 - RNA, 21 nt, artificial
  Chemically synthesized
cacaaaccaaagcuuuuaccu

SEQ ID NO: 38896 - RNA, 21 nt, artificial
  Chemically synthesized
aauacaaagaaacuugcuuuu

SEQ ID NO: 38897 - RNA, 21 nt, artificial
  Chemically synthesized
agggauggacaaaaaggcauu

SEQ ID NO: 38898 - RNA, 21 nt, artificial
  Chemically synthesized
aaccuauuuuaaagaagguaa

SEQ ID NO: 38899 - RNA, 21 nt, artificial
  Chemically synthesized
aguuacagaaguaucuuuuua

SEQ ID NO: 38900 - RNA, 21 nt, artificial
  Chemically synthesized
uaccuaaagacaaaauaugau

SEQ ID NO: 38901 - RNA, 21 nt, artificial
  Chemically synthesized
aagggauggacaaaaaggcau

SEQ ID NO: 38902 - RNA, 21 nt, artificial
  Chemically synthesized
ugcuccgucuugaugugcguu

SEQ ID NO: 38903 - RNA, 21 nt, artificial
  Chemically synthesized
guaucuuuuuaaaaagaucug

SEQ ID NO: 38904 - RNA, 21 nt, artificial
  Chemically synthesized
ugaccauacccuuugaggaaa

SEQ ID NO: 38905 - RNA, 21 nt, artificial
  Chemically synthesized
uagcaaguggaaugucuugaa

SEQ ID NO: 38906 - RNA, 21 nt, artificial
  Chemically synthesized
auucuacugacuucuaaaacu

SEQ ID NO: 38907 - RNA, 21 nt, artificial
  Chemically synthesized
guuuguuuucaacaaaaacaa

SEQ ID NO: 38908 - RNA, 21 nt, artificial
  Chemically synthesized
gucucgauguuggagaugacg

SEQ ID NO: 38909 - RNA, 21 nt, artificial
  Chemically synthesized
ugcuuuuauacagaaauugaa

SEQ ID NO: 38910 - RNA, 21 nt, artificial
  Chemically synthesized
gguucauguaggugaaggugg

SEQ ID NO: 38911 - RNA, 21 nt, artificial
  Chemically synthesized
cuuucuuaagacugcagugaa

SEQ ID NO: 38912 - RNA, 21 nt, artificial
  Chemically synthesized
acuauuguuuacucccauaau

SEQ ID NO: 38913 - RNA, 21 nt, artificial
  Chemically synthesized
uacugacuucuaaaacuguua

SEQ ID NO: 38914 - RNA, 21 nt, artificial
  Chemically synthesized
ucuuaagacugcagugaacaa

SEQ ID NO: 38915 - RNA, 21 nt, artificial
  Chemically synthesized
ggguucauguaggugaaggug

SEQ ID NO: 38916 - RNA, 21 nt, artificial
  Chemically synthesized
uuacucccauaauugcaaaau

SEQ ID NO: 38917 - RNA, 21 nt, artificial
  Chemically synthesized
gauuucgcugcuccauuuagc

SEQ ID NO: 38918 - RNA, 21 nt, artificial
  Chemically synthesized
uuaaggcagcuccuccuuaaa

SEQ ID NO: 38919 - RNA, 21 nt, artificial
  Chemically synthesized
aaagccugaggaauuaagcaa

SEQ ID NO: 38920 - RNA, 21 nt, artificial
  Chemically synthesized
cucacagaggacuuuuuucuu

SEQ ID NO: 38921 - RNA, 21 nt, artificial
  Chemically synthesized
cuguucaacuaagaguaguuu

SEQ ID NO: 38922 - RNA, 21 nt, artificial
  Chemically synthesized
ugcaaucucucauuuauacaa

SEQ ID NO: 38923 - RNA, 21 nt, artificial
  Chemically synthesized
agggugaggaauacaaagaaa

SEQ ID NO: 38924 - RNA, 21 nt, artificial
  Chemically synthesized
cacacuguucaacuaagagua

SEQ ID NO: 38925 - RNA, 21 nt, artificial
  Chemically synthesized
gguugcaagaaaagcuagggc

SEQ ID NO: 38926 - RNA, 21 nt, artificial
  Chemically synthesized
aaaaaggcauuuauacaaauc

SEQ ID NO: 38927 - RNA, 21 nt, artificial
  Chemically synthesized
guuacaguuaagaacauaauu

SEQ ID NO: 38928 - RNA, 21 nt, artificial
  Chemically synthesized
aaaugucuuuaaggaagaaga

SEQ ID NO: 38929 - RNA, 21 nt, artificial
  Chemically synthesized
ccuuaaaucgcaaagccugag

SEQ ID NO: 38930 - RNA, 21 nt, artificial
  Chemically synthesized
uucgguuauuuuuaggaucau

SEQ ID NO: 38931 - RNA, 21 nt, artificial
  Chemically synthesized
gaauacaaagaaacuugcuuu

SEQ ID NO: 38932 - RNA, 21 nt, artificial
  Chemically synthesized
cugcagugaacaagcaaaggc

SEQ ID NO: 38933 - RNA, 21 nt, artificial
  Chemically synthesized
gaggaaaaagagcaaaagugg

SEQ ID NO: 38934 - RNA, 21 nt, artificial
  Chemically synthesized
aaccaaagcuuuuaccuaaag

SEQ ID NO: 38935 - RNA, 21 nt, artificial
  Chemically synthesized
aguggguaaugcgcuuggaua

SEQ ID NO: 38936 - RNA, 21 nt, artificial
  Chemically synthesized
aguugccuuuagcuuaaaugu

SEQ ID NO: 38937 - RNA, 21 nt, artificial
  Chemically synthesized
acaaaucuagggugaggaaua

SEQ ID NO: 38938 - RNA, 21 nt, artificial
  Chemically synthesized
ccuaaagacaaaauaugauuu

SEQ ID NO: 38939 - RNA, 21 nt, artificial
  Chemically synthesized
gcuuaaaugucuuuaaggaag

SEQ ID NO: 38940 - RNA, 21 nt, artificial
  Chemically synthesized
agagaauauuccucacagagg

SEQ ID NO: 38941 - RNA, 21 nt, artificial
  Chemically synthesized
aaagaaacaaguuuccaguuu

SEQ ID NO: 38942 - RNA, 21 nt, artificial
  Chemically synthesized
auccuccacgcuugcucugaa

SEQ ID NO: 38943 - RNA, 21 nt, artificial
  Chemically synthesized
acuaagaguaguuuagcuguu

SEQ ID NO: 38944 - RNA, 21 nt, artificial
  Chemically synthesized
acagaugaccauacccuuuga

SEQ ID NO: 38945 - RNA, 21 nt, artificial
  Chemically synthesized
ccuuuuaccucuuucuuaaga

SEQ ID NO: 38946 - RNA, 21 nt, artificial
  Chemically synthesized
cuucucgcucucguucagaag

SEQ ID NO: 38947 - RNA, 21 nt, artificial
  Chemically synthesized
auacucugguugcaagaaaag

SEQ ID NO: 38948 - RNA, 21 nt, artificial
  Chemically synthesized
gcaaagccugaggaauuaagc

SEQ ID NO: 38949 - RNA, 21 nt, artificial
  Chemically synthesized
caaaaaaagaaacaaguuucc

SEQ ID NO: 38950 - RNA, 21 nt, artificial
  Chemically synthesized
guaaguuucacggagagaaca

SEQ ID NO: 38951 - RNA, 21 nt, artificial
  Chemically synthesized
cuacugacuucuaaaacuguu

SEQ ID NO: 38952 - RNA, 21 nt, artificial
  Chemically synthesized
cuccuccuuaaaucgcaaagc

SEQ ID NO: 38953 - RNA, 21 nt, artificial
  Chemically synthesized
aaaggcauuuauacaaaucua

SEQ ID NO: 38954 - RNA, 21 nt, artificial
  Chemically synthesized
accaaagcuuuuaccuaaaga

SEQ ID NO: 38955 - RNA, 21 nt, artificial
  Chemically synthesized
cagauuucaucuccuuugcuu

SEQ ID NO: 38956 - RNA, 21 nt, artificial
  Chemically synthesized
aaaaguccaguuucucguuga

SEQ ID NO: 38957 - RNA, 21 nt, artificial
  Chemically synthesized
guccaguuucucguugauuuc

SEQ ID NO: 38958 - RNA, 21 nt, artificial
  Chemically synthesized
agcuuaccaaaugcuucucua

SEQ ID NO: 38959 - RNA, 21 nt, artificial
  Chemically synthesized
cucguucagaagucuccagag

SEQ ID NO: 38960 - RNA, 21 nt, artificial
  Chemically synthesized
acaaaaauacucugguugcaa

SEQ ID NO: 38961 - RNA, 21 nt, artificial
  Chemically synthesized
aaauagagaauauuccucaca

SEQ ID NO: 38962 - RNA, 21 nt, artificial
  Chemically synthesized
aaacaagugaaacaaacaaaa

SEQ ID NO: 38963 - RNA, 21 nt, artificial
  Chemically synthesized
cucgauguuggagaugacguc

SEQ ID NO: 38964 - RNA, 21 nt, artificial
  Chemically synthesized
cucuuucuucgguuauuuuua

SEQ ID NO: 38965 - RNA, 21 nt, artificial
  Chemically synthesized
agagagauuuagcacacugau

SEQ ID NO: 38966 - RNA, 21 nt, artificial
  Chemically synthesized
uguuuucaacaaaaacaacaa

SEQ ID NO: 38967 - RNA, 21 nt, artificial
  Chemically synthesized
caguuaagaacauaauuuaac

SEQ ID NO: 38968 - RNA, 21 nt, artificial
  Chemically synthesized
auugcaaaauaaggccuuuau

SEQ ID NO: 38969 - RNA, 21 nt, artificial
  Chemically synthesized
aaauaauuuuagcaaguggaa

SEQ ID NO: 38970 - RNA, 21 nt, artificial
  Chemically synthesized
caaaucuguacaaaaauacuc

SEQ ID NO: 38971 - RNA, 21 nt, artificial
  Chemically synthesized
gcagagagauuuagcacacug

SEQ ID NO: 38972 - RNA, 21 nt, artificial
  Chemically synthesized
ccucacagaggacuuuuuucu

SEQ ID NO: 38973 - RNA, 21 nt, artificial
  Chemically synthesized
uuuacucccauaauugcaaaa

SEQ ID NO: 38974 - RNA, 21 nt, artificial
  Chemically synthesized
caacuaagaguaguuuagcug

SEQ ID NO: 38975 - RNA, 21 nt, artificial
  Chemically synthesized
uaauugcaaaauaaggccuuu

SEQ ID NO: 38976 - RNA, 21 nt, artificial
  Chemically synthesized
aaauacucugguugcaagaaa

SEQ ID NO: 38977 - RNA, 21 nt, artificial
  Chemically synthesized
gguaaugcgcuuggauagguc

SEQ ID NO: 38978 - RNA, 21 nt, artificial
  Chemically synthesized
ucgcaaagccugaggaauuaa

SEQ ID NO: 38979 - RNA, 21 nt, artificial
  Chemically synthesized
guacgaguugccuuuagcuua

SEQ ID NO: 38980 - RNA, 21 nt, artificial
  Chemically synthesized
acuccaagagaagauguagag

SEQ ID NO: 38981 - RNA, 21 nt, artificial
  Chemically synthesized
caaaaauacucugguugcaag

SEQ ID NO: 38982 - RNA, 21 nt, artificial
  Chemically synthesized
cuuguucuugcuggagccguu

SEQ ID NO: 38983 - RNA, 21 nt, artificial
  Chemically synthesized
ccuuugcuugccuuuuaccuc

SEQ ID NO: 38984 - RNA, 21 nt, artificial
  Chemically synthesized
ccucacuccaagagaagaugu

SEQ ID NO: 38985 - RNA, 21 nt, artificial
  Chemically synthesized
gugaacaagcaaaggcaggag

SEQ ID NO: 38986 - RNA, 21 nt, artificial
  Chemically synthesized
aggccuuuauuuuuuuuuaag

SEQ ID NO: 38987 - RNA, 21 nt, artificial
  Chemically synthesized
aaacucguugacaucgaaggu

SEQ ID NO: 38988 - RNA, 21 nt, artificial
  Chemically synthesized
caagguguuuuucucuucuuu

SEQ ID NO: 38989 - RNA, 21 nt, artificial
  Chemically synthesized
gugcaaauguuucccagcagc

SEQ ID NO: 38990 - RNA, 21 nt, artificial
  Chemically synthesized
cucagugauacacuacauuug

SEQ ID NO: 38991 - RNA, 21 nt, artificial
  Chemically synthesized
gcucucguucagaagucucca

SEQ ID NO: 38992 - RNA, 21 nt, artificial
  Chemically synthesized
ugguuacaguuaagaacauaa

SEQ ID NO: 38993 - RNA, 21 nt, artificial
  Chemically synthesized
agguguuuuucucuucuuuaa

SEQ ID NO: 38994 - RNA, 21 nt, artificial
  Chemically synthesized
cuuugaggaaagcuccaacaa

SEQ ID NO: 38995 - RNA, 21 nt, artificial
  Chemically synthesized
agcaaaucuguacaaaaauac

SEQ ID NO: 38996 - RNA, 21 nt, artificial
  Chemically synthesized
gaggguuuaaaaaguccaguu

SEQ ID NO: 38997 - RNA, 21 nt, artificial
  Chemically synthesized
cuuuaaggaagaagaagaaga

SEQ ID NO: 38998 - RNA, 21 nt, artificial
  Chemically synthesized
aaggucugucagugggcugau

SEQ ID NO: 38999 - RNA, 21 nt, artificial
  Chemically synthesized
gguaaguuucacggagagaac

SEQ ID NO: 39000 - RNA, 21 nt, artificial
  Chemically synthesized
caaaauaaggccuuuauuuuu

SEQ ID NO: 39001 - RNA, 21 nt, artificial
  Chemically synthesized
gaaguuuccagucaguuucga

SEQ ID NO: 39002 - RNA, 21 nt, artificial
  Chemically synthesized
cugguacuuguaauccgggug

SEQ ID NO: 39003 - RNA, 21 nt, artificial
  Chemically synthesized
aguuuagcuguuggaaaaaua

SEQ ID NO: 39004 - RNA, 21 nt, artificial
  Chemically synthesized
agaguaguuuagcuguuggaa

SEQ ID NO: 39005 - RNA, 21 nt, artificial
  Chemically synthesized
aguaguuuagcuguuggaaaa

SEQ ID NO: 39006 - RNA, 21 nt, artificial
  Chemically synthesized
gagagauuuagcacacugauc

SEQ ID NO: 39007 - RNA, 21 nt, artificial
  Chemically synthesized
aauuuaacaacagaugaccau

SEQ ID NO: 39008 - RNA, 21 nt, artificial
  Chemically synthesized
aaugcgcuuggauaggucaug

SEQ ID NO: 39009 - RNA, 21 nt, artificial
  Chemically synthesized
cagaaguaucuuuuuaaaaag

SEQ ID NO: 39010 - RNA, 21 nt, artificial
  Chemically synthesized
cccaaaacugaucacauaaca

SEQ ID NO: 39011 - RNA, 21 nt, artificial
  Chemically synthesized
caaaaacaacaaagaaaaaag

SEQ ID NO: 39012 - RNA, 21 nt, artificial
  Chemically synthesized
acaaaccaaagcuuuuaccua

SEQ ID NO: 39013 - RNA, 21 nt, artificial
  Chemically synthesized
cuuaaaugucuuuaaggaaga

SEQ ID NO: 39014 - RNA, 21 nt, artificial
  Chemically synthesized
gagauuuagcacacugaucac

SEQ ID NO: 39015 - RNA, 21 nt, artificial
  Chemically synthesized
acaaagaaacuugcuuuuaau

SEQ ID NO: 39016 - RNA, 21 nt, artificial
  Chemically synthesized
aggacuuuuuucuuuaauuac

SEQ ID NO: 39017 - RNA, 21 nt, artificial
  Chemically synthesized
cacaaguggguaaugcgcuug

SEQ ID NO: 39018 - RNA, 21 nt, artificial
  Chemically synthesized
aacaggcagagagauuuagca

SEQ ID NO: 39019 - RNA, 21 nt, artificial
  Chemically synthesized
cuccuccugcaaagaaaaguu

SEQ ID NO: 39020 - RNA, 21 nt, artificial
  Chemically synthesized
agaacagauuucaucuccuuu

SEQ ID NO: 39021 - RNA, 21 nt, artificial
  Chemically synthesized
agcaaaggcaggaggaaaugc

SEQ ID NO: 39022 - RNA, 21 nt, artificial
  Chemically synthesized
cacaccaugaaggcguucaug

SEQ ID NO: 39023 - RNA, 21 nt, artificial
  Chemically synthesized
ucaacaaaaacaacaaagaaa

SEQ ID NO: 39024 - RNA, 21 nt, artificial
  Chemically synthesized
agacuauuguuuacucccaua

SEQ ID NO: 39025 - RNA, 21 nt, artificial
  Chemically synthesized
cuguacaaaaauacucugguu

SEQ ID NO: 39026 - RNA, 21 nt, artificial
  Chemically synthesized
acaucgaaggucucgauguug

SEQ ID NO: 39027 - RNA, 21 nt, artificial
  Chemically synthesized
aaaugacucagugauacacua

SEQ ID NO: 39028 - RNA, 21 nt, artificial
  Chemically synthesized
guggguaaugcgcuuggauag

SEQ ID NO: 39029 - RNA, 21 nt, artificial
  Chemically synthesized
gguuucuuaaguuacagaagu

SEQ ID NO: 39030 - RNA, 21 nt, artificial
  Chemically synthesized
guuuuaaggcucaagguguuu

SEQ ID NO: 39031 - RNA, 21 nt, artificial
  Chemically synthesized
aagcuuuuaccuaaagacaaa

SEQ ID NO: 39032 - RNA, 21 nt, artificial
  Chemically synthesized
auagagaauauuccucacaga

SEQ ID NO: 39033 - RNA, 21 nt, artificial
  Chemically synthesized
agugauacacuacauuugcaa

SEQ ID NO: 39034 - RNA, 21 nt, artificial
  Chemically synthesized
aaagaaaaaagggauggacaa

SEQ ID NO: 39035 - RNA, 21 nt, artificial
  Chemically synthesized
gcagguacuggucaaacucgu

SEQ ID NO: 39036 - RNA, 21 nt, artificial
  Chemically synthesized
cucucauuuauacaaaaaaag

SEQ ID NO: 39037 - RNA, 21 nt, artificial
  Chemically synthesized
guacuuguaauccgggugguc

SEQ ID NO: 39038 - RNA, 21 nt, artificial
  Chemically synthesized
ucccucacuccaagagaagau

SEQ ID NO: 39039 - RNA, 21 nt, artificial
  Chemically synthesized
augcacuaaaagagugcaaau

SEQ ID NO: 39040 - RNA, 21 nt, artificial
  Chemically synthesized
cuggucaaacucguugacauc

SEQ ID NO: 39041 - RNA, 21 nt, artificial
  Chemically synthesized
acgcuugcucugaagaggguu

SEQ ID NO: 39042 - RNA, 21 nt, artificial
  Chemically synthesized
acacuacauuugcaaucucuc

SEQ ID NO: 39043 - RNA, 21 nt, artificial
  Chemically synthesized
ccucgcucuccuucuucagau

SEQ ID NO: 39044 - RNA, 21 nt, artificial
  Chemically synthesized
agaauauuccucacagaggac

SEQ ID NO: 39045 - RNA, 21 nt, artificial
  Chemically synthesized
aaguggguaaugcgcuuggau

SEQ ID NO: 39046 - RNA, 21 nt, artificial
  Chemically synthesized
acggagagaacaaaagguuug

SEQ ID NO: 39047 - RNA, 21 nt, artificial
  Chemically synthesized
cucuccuuacaaaauaaauaa

SEQ ID NO: 39048 - RNA, 21 nt, artificial
  Chemically synthesized
uacucccauaauugcaaaaua

SEQ ID NO: 39049 - RNA, 21 nt, artificial
  Chemically synthesized
ccuccuuaaaucgcaaagccu

SEQ ID NO: 39050 - RNA, 21 nt, artificial
  Chemically synthesized
aagaucugcuuuuauacagaa

SEQ ID NO: 39051 - RNA, 21 nt, artificial
  Chemically synthesized
gaauucugguugguccucucu

SEQ ID NO: 39052 - RNA, 21 nt, artificial
  Chemically synthesized
ccuuuagcuuaaaugucuuua

SEQ ID NO: 39053 - RNA, 21 nt, artificial
  Chemically synthesized
cugcucgucggucaucuucau

SEQ ID NO: 39054 - RNA, 21 nt, artificial
  Chemically synthesized
cgcaaagccugaggaauuaag

SEQ ID NO: 39055 - RNA, 21 nt, artificial
  Chemically synthesized
caacagaugaccauacccuuu

SEQ ID NO: 39056 - RNA, 21 nt, artificial
  Chemically synthesized
ggcauuuauacaaaucuaggg

SEQ ID NO: 39057 - RNA, 21 nt, artificial
  Chemically synthesized
acccuuugaggaaagcuccaa

SEQ ID NO: 39058 - RNA, 21 nt, artificial
  Chemically synthesized
caaaucuagggugaggaauac

SEQ ID NO: 39059 - RNA, 21 nt, artificial
  Chemically synthesized
ugacaucgaaggucucgaugu

SEQ ID NO: 39060 - RNA, 21 nt, artificial
  Chemically synthesized
caaguuuccaguuuguuuuca

SEQ ID NO: 39061 - RNA, 21 nt, artificial
  Chemically synthesized
ggaauucugguugguccucuc

SEQ ID NO: 39062 - RNA, 21 nt, artificial
  Chemically synthesized
cuuuuaccuaaagacaaaaua

SEQ ID NO: 39063 - RNA, 21 nt, artificial
  Chemically synthesized
guucagaagucuccagagcuu

SEQ ID NO: 39064 - RNA, 21 nt, artificial
  Chemically synthesized
aaaaugguaaugaaucauaca

SEQ ID NO: 39065 - RNA, 21 nt, artificial
  Chemically synthesized
aaagaucugcuuuuauacaga

SEQ ID NO: 39066 - RNA, 21 nt, artificial
  Chemically synthesized
cacaauucuguuuuuaaaugu

SEQ ID NO: 39067 - RNA, 21 nt, artificial
  Chemically synthesized
aaggucucgauguuggagaug

SEQ ID NO: 39068 - RNA, 21 nt, artificial
  Chemically synthesized
caccguuuuaaggcucaaggu

SEQ ID NO: 39069 - RNA, 21 nt, artificial
  Chemically synthesized
aagaaaaaagggauggacaaa

SEQ ID NO: 39070 - RNA, 21 nt, artificial
  Chemically synthesized
gaaacaaacaaaacacgaaca

SEQ ID NO: 39071 - RNA, 21 nt, artificial
  Chemically synthesized
acaagugaaacaaacaaaaca

SEQ ID NO: 39072 - RNA, 21 nt, artificial
  Chemically synthesized
guugacaucgaaggucucgau

SEQ ID NO: 39073 - RNA, 21 nt, artificial
  Chemically synthesized
cccucaaaaugguaaugaauc

SEQ ID NO: 39074 - RNA, 21 nt, artificial
  Chemically synthesized
gguacuggucaaacucguuga

SEQ ID NO: 39075 - RNA, 21 nt, artificial
  Chemically synthesized
accauacccuuugaggaaagc

SEQ ID NO: 39076 - RNA, 21 nt, artificial
  Chemically synthesized
guacuggucaaacucguugac

SEQ ID NO: 39077 - RNA, 21 nt, artificial
  Chemically synthesized
aaaugcacuaaaagagugcaa

SEQ ID NO: 39078 - RNA, 21 nt, artificial
  Chemically synthesized
gcuuuaagauuuuauucuacu

SEQ ID NO: 39079 - RNA, 21 nt, artificial
  Chemically synthesized
gauguuggagaugacgucgcu

SEQ ID NO: 39080 - RNA, 21 nt, artificial
  Chemically synthesized
caaaccaaagcuuuuaccuaa

SEQ ID NO: 39081 - RNA, 21 nt, artificial
  Chemically synthesized
agcaccguuuuaaggcucaag

SEQ ID NO: 39082 - RNA, 21 nt, artificial
  Chemically synthesized
gguuuaaaaaguccaguuucu

SEQ ID NO: 39083 - RNA, 21 nt, artificial
  Chemically synthesized
aagauguagagaaauauggau

SEQ ID NO: 39084 - RNA, 21 nt, artificial
  Chemically synthesized
cauaauuuaacaacagaugac

SEQ ID NO: 39085 - RNA, 21 nt, artificial
  Chemically synthesized
agcuuuuaccuaaagacaaaa

SEQ ID NO: 39086 - RNA, 21 nt, artificial
  Chemically synthesized
cucuucuccuccugcaaagaa

SEQ ID NO: 39087 - RNA, 21 nt, artificial
  Chemically synthesized
cucucuuucuucgguuauuuu

SEQ ID NO: 39088 - RNA, 21 nt, artificial
  Chemically synthesized
gaccauacccuuugaggaaag

SEQ ID NO: 39089 - RNA, 21 nt, artificial
  Chemically synthesized
gguacgaguugccuuuagcuu

SEQ ID NO: 39090 - RNA, 21 nt, artificial
  Chemically synthesized
aguuuccaguuuguuuucaac

SEQ ID NO: 39091 - RNA, 21 nt, artificial
  Chemically synthesized
agugcaaauguuucccagcag

SEQ ID NO: 39092 - RNA, 21 nt, artificial
  Chemically synthesized
ccagguuucuuaaguuacaga

SEQ ID NO: 39093 - RNA, 21 nt, artificial
  Chemically synthesized
gccuuuauuuuuuuuuaaggc

SEQ ID NO: 39094 - RNA, 21 nt, artificial
  Chemically synthesized
gaaagcuccaacaaccuauuu

SEQ ID NO: 39095 - RNA, 21 nt, artificial
  Chemically synthesized
agguaaguuucacggagagaa

SEQ ID NO: 39096 - RNA, 21 nt, artificial
  Chemically synthesized
aagcuccaacaaccuauuuua

SEQ ID NO: 39097 - RNA, 21 nt, artificial
  Chemically synthesized
gcugguacuuguaauccgggu

SEQ ID NO: 39098 - RNA, 21 nt, artificial
  Chemically synthesized
aagaguaguuuagcuguugga

SEQ ID NO: 39099 - RNA, 21 nt, artificial
  Chemically synthesized
cacugaaguuuccagucaguu

SEQ ID NO: 39100 - RNA, 21 nt, artificial
  Chemically synthesized
auauuccucacagaggacuuu

SEQ ID NO: 39101 - RNA, 21 nt, artificial
  Chemically synthesized
cucgcucuccuucuucagauc

SEQ ID NO: 39102 - RNA, 21 nt, artificial
  Chemically synthesized
caacaaagaaaaaagggaugg

SEQ ID NO: 39103 - RNA, 21 nt, artificial
  Chemically synthesized
gcuguuggaaaaauaagagca

SEQ ID NO: 39104 - RNA, 21 nt, artificial
  Chemically synthesized
cuccaacaaccuauuuuaaag

SEQ ID NO: 39105 - RNA, 21 nt, artificial
  Chemically synthesized
auuccucacagaggacuuuuu

SEQ ID NO: 39106 - RNA, 21 nt, artificial
  Chemically synthesized
aaugucuuuaaggaagaagaa

SEQ ID NO: 39107 - RNA, 21 nt, artificial
  Chemically synthesized
cacaguacauacuaaaaauau

SEQ ID NO: 39108 - RNA, 21 nt, artificial
  Chemically synthesized
agagaaagcaaaucuguacaa

SEQ ID NO: 39109 - RNA, 21 nt, artificial
  Chemically synthesized
cgaaggucucgauguuggaga

SEQ ID NO: 39110 - RNA, 21 nt, artificial
  Chemically synthesized
agggcacacuguucaacuaag

SEQ ID NO: 39111 - RNA, 21 nt, artificial
  Chemically synthesized
guaaugcgcuuggauagguca

SEQ ID NO: 39112 - RNA, 21 nt, artificial
  Chemically synthesized
gaaaagcuagggcacacuguu

SEQ ID NO: 39113 - RNA, 21 nt, artificial
  Chemically synthesized
cgcuuggauaggucauguuug

SEQ ID NO: 39114 - RNA, 21 nt, artificial
  Chemically synthesized
cacuacauuugcaaucucuca

SEQ ID NO: 39115 - RNA, 21 nt, artificial
  Chemically synthesized
ccuuuauuuuuuuuuaaggca

SEQ ID NO: 39116 - RNA, 21 nt, artificial
  Chemically synthesized
guaggugaagguggaguagag

SEQ ID NO: 39117 - RNA, 21 nt, artificial
  Chemically synthesized
gcaaucucucauuuauacaaa

SEQ ID NO: 39118 - RNA, 21 nt, artificial
  Chemically synthesized
aagcaaaucuguacaaaaaua

SEQ ID NO: 39119 - RNA, 21 nt, artificial
  Chemically synthesized
cagaacagauuucaucuccuu

SEQ ID NO: 39120 - RNA, 21 nt, artificial
  Chemically synthesized
cagaugaccauacccuuugag

SEQ ID NO: 39121 - RNA, 21 nt, artificial
  Chemically synthesized
aacaaagaaaaaagggaugga

SEQ ID NO: 39122 - RNA, 21 nt, artificial
  Chemically synthesized
accucuccuuacaaaauaaau

SEQ ID NO: 39123 - RNA, 21 nt, artificial
  Chemically synthesized
gucgguguagucguacuguga

SEQ ID NO: 39124 - RNA, 21 nt, artificial
  Chemically synthesized
acuggucaaacucguugacau

SEQ ID NO: 39125 - RNA, 21 nt, artificial
  Chemically synthesized
cugguuacaguuaagaacaua

SEQ ID NO: 39126 - RNA, 21 nt, artificial
  Chemically synthesized
gcagugaacaagcaaaggcag

SEQ ID NO: 39127 - RNA, 21 nt, artificial
  Chemically synthesized
guaagagaaagcaaaucugua

SEQ ID NO: 39128 - RNA, 21 nt, artificial
  Chemically synthesized
cuucucuagacuauuguuuac

SEQ ID NO: 39129 - RNA, 21 nt, artificial
  Chemically synthesized
guucauguaggugaaggugga

SEQ ID NO: 39130 - RNA, 21 nt, artificial
  Chemically synthesized
cacagaggacuuuuuucuuua

SEQ ID NO: 39131 - RNA, 21 nt, artificial
  Chemically synthesized
acugcaaaugacucagugaua

SEQ ID NO: 39132 - RNA, 21 nt, artificial
  Chemically synthesized
aauacucugguugcaagaaaa

SEQ ID NO: 39133 - RNA, 23 nt, artificial
  Chemically synthesized
gaauaaaaucuuaaagcacucau

SEQ ID NO: 39134 - RNA, 23 nt, artificial
  Chemically synthesized
gacuuuuuaaacccucuucagag

SEQ ID NO: 39135 - RNA, 23 nt, artificial
  Chemically synthesized
aaaaauaaaggccuuauuuugca

SEQ ID NO: 39136 - RNA, 23 nt, artificial
  Chemically synthesized
uguaugauucauuaccauuuuga

SEQ ID NO: 39137 - RNA, 23 nt, artificial
  Chemically synthesized
uuauuuuguaaggagagguuuua

SEQ ID NO: 39138 - RNA, 23 nt, artificial
  Chemically synthesized
guuucuuuuuuuguauaaaugag

SEQ ID NO: 39139 - RNA, 23 nt, artificial
  Chemically synthesized
cuaaaucucucugccuguuugga

SEQ ID NO: 39140 - RNA, 23 nt, artificial
  Chemically synthesized
ccuuaaaaaaaaauaaaggccuu

SEQ ID NO: 39141 - RNA, 23 nt, artificial
  Chemically synthesized
gauauauuaacaguuuuagaagu

SEQ ID NO: 39142 - RNA, 23 nt, artificial
  Chemically synthesized
uuuccaacagcuaaacuacucuu

SEQ ID NO: 39143 - RNA, 23 nt, artificial
  Chemically synthesized
cuuuuuaaacccucuucagagca

SEQ ID NO: 39144 - RNA, 23 nt, artificial
  Chemically synthesized
gcgauuuaaggaggagcugccuu

SEQ ID NO: 39145 - RNA, 23 nt, artificial
  Chemically synthesized
gaucuuuuuaaaaagauacuucu

SEQ ID NO: 39146 - RNA, 23 nt, artificial
  Chemically synthesized
uuauuuugcaauuaugggaguaa

SEQ ID NO: 39147 - RNA, 23 nt, artificial
  Chemically synthesized
cuagauuuguauaaaugccuuuu

SEQ ID NO: 39148 - RNA, 23 nt, artificial
  Chemically synthesized
aacauuugcacucuuuuagugca

SEQ ID NO: 39149 - RNA, 23 nt, artificial
  Chemically synthesized
cuuuguaauuauuuuuuuagcag

SEQ ID NO: 39150 - RNA, 23 nt, artificial
  Chemically synthesized
aaacaugaccuauccaagcgcau

SEQ ID NO: 39151 - RNA, 23 nt, artificial
  Chemically synthesized
cuuuuuuuguauaaaugagagau

SEQ ID NO: 39152 - RNA, 23 nt, artificial
  Chemically synthesized
guuuacaauaaauauacauugca

SEQ ID NO: 39153 - RNA, 23 nt, artificial
  Chemically synthesized
aaauagguuguuggagcuuuccu

SEQ ID NO: 39154 - RNA, 23 nt, artificial
  Chemically synthesized
gauuuguauaaaugccuuuuugu

SEQ ID NO: 39155 - RNA, 23 nt, artificial
  Chemically synthesized
cuucuguaacuuaagaaaccugg

SEQ ID NO: 39156 - RNA, 23 nt, artificial
  Chemically synthesized
uauuaacaguuuuagaagucagu

SEQ ID NO: 39157 - RNA, 23 nt, artificial
  Chemically synthesized
cuuaaaaaaaaauaaaggccuua

SEQ ID NO: 39158 - RNA, 23 nt, artificial
  Chemically synthesized
ucuuuuuuuguauaaaugagaga

SEQ ID NO: 39159 - RNA, 23 nt, artificial
  Chemically synthesized
agauauauuaacaguuuuagaag

SEQ ID NO: 39160 - RNA, 23 nt, artificial
  Chemically synthesized
guuguauuaacauuuaaaaacag

SEQ ID NO: 39161 - RNA, 23 nt, artificial
  Chemically synthesized
acauuugcacucuuuuagugcau

SEQ ID NO: 39162 - RNA, 23 nt, artificial
  Chemically synthesized
ucagagcaagcguggaggaugau

SEQ ID NO: 39163 - RNA, 23 nt, artificial
  Chemically synthesized
uuguuaaauuauguucuuaacug

SEQ ID NO: 39164 - RNA, 23 nt, artificial
  Chemically synthesized
uuccaacagcuaaacuacucuua

SEQ ID NO: 39165 - RNA, 23 nt, artificial
  Chemically synthesized
auauuaacaguuuuagaagucag

SEQ ID NO: 39166 - RNA, 23 nt, artificial
  Chemically synthesized
aauagucuagagaagcauuuggu

SEQ ID NO: 39167 - RNA, 23 nt, artificial
  Chemically synthesized
gacuuuguaauuauuuuuuuagc

SEQ ID NO: 39168 - RNA, 23 nt, artificial
  Chemically synthesized
uuguuucacuuguuucccuccca

SEQ ID NO: 39169 - RNA, 23 nt, artificial
  Chemically synthesized
ucuuuuuaaaaagauacuucugu

SEQ ID NO: 39170 - RNA, 23 nt, artificial
  Chemically synthesized
gagaaucgugugaucagugugcu

SEQ ID NO: 39171 - RNA, 23 nt, artificial
  Chemically synthesized
uauauuaacaguuuuagaaguca

SEQ ID NO: 39172 - RNA, 23 nt, artificial
  Chemically synthesized
uuucuugcaaccagaguauuuuu

SEQ ID NO: 39173 - RNA, 23 nt, artificial
  Chemically synthesized
uguuuuguuuguuucacuuguuu

SEQ ID NO: 39174 - RNA, 23 nt, artificial
  Chemically synthesized
ucuucagagcaagcguggaggau

SEQ ID NO: 39175 - RNA, 23 nt, artificial
  Chemically synthesized
auuuuuccaacagcuaaacuacu

SEQ ID NO: 39176 - RNA, 23 nt, artificial
  Chemically synthesized
uuuuguacagauuugcuuucucu

SEQ ID NO: 39177 - RNA, 23 nt, artificial
  Chemically synthesized
ugccuuugcuuguucacugcagu

SEQ ID NO: 39178 - RNA, 23 nt, artificial
  Chemically synthesized
auuuuaccuucuuuaaaauaggu

SEQ ID NO: 39179 - RNA, 23 nt, artificial
  Chemically synthesized
cuuuucuugcaaccagaguauuu

SEQ ID NO: 39180 - RNA, 23 nt, artificial
  Chemically synthesized
guaucacugagucauuugcagug

SEQ ID NO: 39181 - RNA, 23 nt, artificial
  Chemically synthesized
uuaauuccucaggcuuugcgauu

SEQ ID NO: 39182 - RNA, 23 nt, artificial
  Chemically synthesized
guauuuuuguacagauuugcuuu

SEQ ID NO: 39183 - RNA, 23 nt, artificial
  Chemically synthesized
aauuuuaccuucuuuaaaauagg

SEQ ID NO: 39184 - RNA, 23 nt, artificial
  Chemically synthesized
cuuuaaaauagguuguuggagcu

SEQ ID NO: 39185 - RNA, 23 nt, artificial
  Chemically synthesized
ucuacaucuucucuuggagugag

SEQ ID NO: 39186 - RNA, 23 nt, artificial
  Chemically synthesized
aaauuaaaugcucuuauuuuucc

SEQ ID NO: 39187 - RNA, 23 nt, artificial
  Chemically synthesized
auuaacaguuuuagaagucagua

SEQ ID NO: 39188 - RNA, 23 nt, artificial
  Chemically synthesized
uuuuucuuuguuguuuuuguuga

SEQ ID NO: 39189 - RNA, 23 nt, artificial
  Chemically synthesized
uuuauuuuguaaggagagguuuu

SEQ ID NO: 39190 - RNA, 23 nt, artificial
  Chemically synthesized
uuuucuugcaaccagaguauuuu

SEQ ID NO: 39191 - RNA, 23 nt, artificial
  Chemically synthesized
auuuguauaaaugccuuuuuguc

SEQ ID NO: 39192 - RNA, 23 nt, artificial
  Chemically synthesized
ugcacucuuuuagugcauuuccu

SEQ ID NO: 39193 - RNA, 23 nt, artificial
  Chemically synthesized
uuaaaauagguuguuggagcuuu

SEQ ID NO: 39194 - RNA, 23 nt, artificial
  Chemically synthesized
aaaucucucugccuguuuggacu

SEQ ID NO: 39195 - RNA, 23 nt, artificial
  Chemically synthesized
aaauauuuuuaguauguacugug

SEQ ID NO: 39196 - RNA, 23 nt, artificial
  Chemically synthesized
cuacucuuaguugaacagugugc

SEQ ID NO: 39197 - RNA, 23 nt, artificial
  Chemically synthesized
cauuugcacucuuuuagugcauu

SEQ ID NO: 39198 - RNA, 23 nt, artificial
  Chemically synthesized
cuuauuuugcaauuaugggagua

SEQ ID NO: 39199 - RNA, 23 nt, artificial
  Chemically synthesized
aguuucuuuguauuccucacccu

SEQ ID NO: 39200 - RNA, 23 nt, artificial
  Chemically synthesized
uuauuaaaagcaaguuucuuugu

SEQ ID NO: 39201 - RNA, 23 nt, artificial
  Chemically synthesized
gccuuugcuuguucacugcaguc

SEQ ID NO: 39202 - RNA, 23 nt, artificial
  Chemically synthesized
uagauuuguauaaaugccuuuuu

SEQ ID NO: 39203 - RNA, 23 nt, artificial
  Chemically synthesized
uucucuacaucuucucuuggagu

SEQ ID NO: 39204 - RNA, 23 nt, artificial
  Chemically synthesized
aucucucugccuguuuggacuuu

SEQ ID NO: 39205 - RNA, 23 nt, artificial
  Chemically synthesized
uuuguacagauuugcuuucucuu

SEQ ID NO: 39206 - RNA, 23 nt, artificial
  Chemically synthesized
acucuuuuagugcauuuccuccu

SEQ ID NO: 39207 - RNA, 23 nt, artificial
  Chemically synthesized
uaaaucauauuuugucuuuaggu

SEQ ID NO: 39208 - RNA, 23 nt, artificial
  Chemically synthesized
aacaugaccuauccaagcgcauu

SEQ ID NO: 39209 - RNA, 23 nt, artificial
  Chemically synthesized
uucuuuuuuuguauaaaugagag

SEQ ID NO: 39210 - RNA, 23 nt, artificial
  Chemically synthesized
aauuaaagaaaaaaguccucugu

SEQ ID NO: 39211 - RNA, 23 nt, artificial
  Chemically synthesized
ugcgauuuaaggaggagcugccu

SEQ ID NO: 39212 - RNA, 23 nt, artificial
  Chemically synthesized
cuacaucuucucuuggagugagg

SEQ ID NO: 39213 - RNA, 23 nt, artificial
  Chemically synthesized
auuugcacucuuuuagugcauuu

SEQ ID NO: 39214 - RNA, 23 nt, artificial
  Chemically synthesized
cucuacaucuucucuuggaguga

SEQ ID NO: 39215 - RNA, 23 nt, artificial
  Chemically synthesized
uuaacaguuuuagaagucaguag

SEQ ID NO: 39216 - RNA, 23 nt, artificial
  Chemically synthesized
ccuucuuuaaaauagguuguugg

SEQ ID NO: 39217 - RNA, 23 nt, artificial
  Chemically synthesized
cacucuuuuagugcauuuccucc

SEQ ID NO: 39218 - RNA, 23 nt, artificial
  Chemically synthesized
agaucuuuuuaaaaagauacuuc

SEQ ID NO: 39219 - RNA, 23 nt, artificial
  Chemically synthesized
uguuucacuuguuucccucccag

SEQ ID NO: 39220 - RNA, 23 nt, artificial
  Chemically synthesized
uaaaauagguuguuggagcuuuc

SEQ ID NO: 39221 - RNA, 23 nt, artificial
  Chemically synthesized
aucacccgcucacaguacgacua

SEQ ID NO: 39222 - RNA, 23 nt, artificial
  Chemically synthesized
uuuagugcauuuccuccugccuu

SEQ ID NO: 39223 - RNA, 23 nt, artificial
  Chemically synthesized
ucuuuagguaaaagcuuugguuu

SEQ ID NO: 39224 - RNA, 23 nt, artificial
  Chemically synthesized
guuucacuuguuucccucccagc

SEQ ID NO: 39225 - RNA, 23 nt, artificial
  Chemically synthesized
aaggagaugaaaucuguucuggg

SEQ ID NO: 39226 - RNA, 23 nt, artificial
  Chemically synthesized
uugcgauuuaaggaggagcugcc

SEQ ID NO: 39227 - RNA, 23 nt, artificial
  Chemically synthesized
agugcauuuccuccugccuuugc

SEQ ID NO: 39228 - RNA, 23 nt, artificial
  Chemically synthesized
cuuuagguaaaagcuuugguuug

SEQ ID NO: 39229 - RNA, 23 nt, artificial
  Chemically synthesized
uaacauuuaaaaacagaauugug

SEQ ID NO: 39230 - RNA, 23 nt, artificial
  Chemically synthesized
acuuugcuuaauuccucaggcuu

SEQ ID NO: 39231 - RNA, 23 nt, artificial
  Chemically synthesized
aaguuucuuuguauuccucaccc

SEQ ID NO: 39232 - RNA, 23 nt, artificial
  Chemically synthesized
aguauuuuuguacagauuugcuu

SEQ ID NO: 39233 - RNA, 23 nt, artificial
  Chemically synthesized
uuaccuucuuuaaaauagguugu

SEQ ID NO: 39234 - RNA, 23 nt, artificial
  Chemically synthesized
guuuguuucacuuguuucccucc

SEQ ID NO: 39235 - RNA, 23 nt, artificial
  Chemically synthesized
uaaaugccuuuuuguccaucccu

SEQ ID NO: 39236 - RNA, 23 nt, artificial
  Chemically synthesized
acuacucuuaguugaacagugug

SEQ ID NO: 39237 - RNA, 23 nt, artificial
  Chemically synthesized
agauuuguauaaaugccuuuuug

SEQ ID NO: 39238 - RNA, 23 nt, artificial
  Chemically synthesized
ugcauuuccuccugccuuugcuu

SEQ ID NO: 39239 - RNA, 23 nt, artificial
  Chemically synthesized
uucucuccgugaaacuuaccuuu

SEQ ID NO: 39240 - RNA, 23 nt, artificial
  Chemically synthesized
uccuccugccuuugcuuguucac

SEQ ID NO: 39241 - RNA, 23 nt, artificial
  Chemically synthesized
aaacccucuucagagcaagcgug

SEQ ID NO: 39242 - RNA, 23 nt, artificial
  Chemically synthesized
uuguuuguuucacuuguuucccu

SEQ ID NO: 39243 - RNA, 23 nt, artificial
  Chemically synthesized
acuuuuuaaacccucuucagagc

SEQ ID NO: 39244 - RNA, 23 nt, artificial
  Chemically synthesized
aauagguuguuggagcuuuccuc

SEQ ID NO: 39245 - RNA, 23 nt, artificial
  Chemically synthesized
uuuuaaacccucuucagagcaag

SEQ ID NO: 39246 - RNA, 23 nt, artificial
  Chemically synthesized
uuccuccugccuuugcuuguuca

SEQ ID NO: 39247 - RNA, 23 nt, artificial
  Chemically synthesized
aaucucucugccuguuuggacuu

SEQ ID NO: 39248 - RNA, 23 nt, artificial
  Chemically synthesized
uccaucccuuuuuucuuuguugu

SEQ ID NO: 39249 - RNA, 23 nt, artificial
  Chemically synthesized
cauuuccuccugccuuugcuugu

SEQ ID NO: 39250 - RNA, 23 nt, artificial
  Chemically synthesized
cucuuuuagugcauuuccuccug

SEQ ID NO: 39251 - RNA, 23 nt, artificial
  Chemically synthesized
augagugcuuuaagauuuuauuc

SEQ ID NO: 39252 - RNA, 23 nt, artificial
  Chemically synthesized
cucugaagaggguuuaaaaaguc

SEQ ID NO: 39253 - RNA, 23 nt, artificial
  Chemically synthesized
ugcaaaauaaggccuuuauuuuu

SEQ ID NO: 39254 - RNA, 23 nt, artificial
  Chemically synthesized
ucaaaaugguaaugaaucauaca

SEQ ID NO: 39255 - RNA, 23 nt, artificial
  Chemically synthesized
uaaaaccucuccuuacaaaauaa

SEQ ID NO: 39256 - RNA, 23 nt, artificial
  Chemically synthesized
cucauuuauacaaaaaaagaaac

SEQ ID NO: 39257 - RNA, 23 nt, artificial
  Chemically synthesized
uccaaacaggcagagagauuuag

SEQ ID NO: 39258 - RNA, 23 nt, artificial
  Chemically synthesized
aaggccuuuauuuuuuuuuaagg

SEQ ID NO: 39259 - RNA, 23 nt, artificial
  Chemically synthesized
acuucuaaaacuguuaauauauc

SEQ ID NO: 39260 - RNA, 23 nt, artificial
  Chemically synthesized
aagaguaguuuagcuguuggaaa

SEQ ID NO: 39261 - RNA, 23 nt, artificial
  Chemically synthesized
ugcucugaagaggguuuaaaaag

SEQ ID NO: 39262 - RNA, 23 nt, artificial
  Chemically synthesized
aaggcagcuccuccuuaaaucgc

SEQ ID NO: 39263 - RNA, 23 nt, artificial
  Chemically synthesized
agaaguaucuuuuuaaaaagauc

SEQ ID NO: 39264 - RNA, 23 nt, artificial
  Chemically synthesized
uuacucccauaauugcaaaauaa

SEQ ID NO: 39265 - RNA, 23 nt, artificial
  Chemically synthesized
aaaaggcauuuauacaaaucuag

SEQ ID NO: 39266 - RNA, 23 nt, artificial
  Chemically synthesized
ugcacuaaaagagugcaaauguu

SEQ ID NO: 39267 - RNA, 23 nt, artificial
  Chemically synthesized
cugcuaaaaaaauaauuacaaag

SEQ ID NO: 39268 - RNA, 23 nt, artificial
  Chemically synthesized
augcgcuuggauaggucauguuu

SEQ ID NO: 39269 - RNA, 23 nt, artificial
  Chemically synthesized
aucucucauuuauacaaaaaaag

SEQ ID NO: 39270 - RNA, 23 nt, artificial
  Chemically synthesized
ugcaauguauauuuauuguaaac

SEQ ID NO: 39271 - RNA, 23 nt, artificial
  Chemically synthesized
aggaaagcuccaacaaccuauuu

SEQ ID NO: 39272 - RNA, 23 nt, artificial
  Chemically synthesized
acaaaaaggcauuuauacaaauc

SEQ ID NO: 39273 - RNA, 23 nt, artificial
  Chemically synthesized
ccagguuucuuaaguuacagaag

SEQ ID NO: 39274 - RNA, 23 nt, artificial
  Chemically synthesized
acugacuucuaaaacuguuaaua

SEQ ID NO: 39275 - RNA, 23 nt, artificial
  Chemically synthesized
uaaggccuuuauuuuuuuuuaag

SEQ ID NO: 39276 - RNA, 23 nt, artificial
  Chemically synthesized
ucucucauuuauacaaaaaaaga

SEQ ID NO: 39277 - RNA, 23 nt, artificial
  Chemically synthesized
cuucuaaaacuguuaauauaucu

SEQ ID NO: 39278 - RNA, 23 nt, artificial
  Chemically synthesized
cuguuuuuaaauguuaauacaac

SEQ ID NO: 39279 - RNA, 23 nt, artificial
  Chemically synthesized
augcacuaaaagagugcaaaugu

SEQ ID NO: 39280 - RNA, 23 nt, artificial
  Chemically synthesized
aucauccuccacgcuugcucuga

SEQ ID NO: 39281 - RNA, 23 nt, artificial
  Chemically synthesized
caguuaagaacauaauuuaacaa

SEQ ID NO: 39282 - RNA, 23 nt, artificial
  Chemically synthesized
uaagaguaguuuagcuguuggaa

SEQ ID NO: 39283 - RNA, 23 nt, artificial
  Chemically synthesized
cugacuucuaaaacuguuaauau

SEQ ID NO: 39284 - RNA, 23 nt, artificial
  Chemically synthesized
accaaaugcuucucuagacuauu

SEQ ID NO: 39285 - RNA, 23 nt, artificial
  Chemically synthesized
gcuaaaaaaauaauuacaaaguc

SEQ ID NO: 39286 - RNA, 23 nt, artificial
  Chemically synthesized
ugggagggaaacaagugaaacaa

SEQ ID NO: 39287 - RNA, 23 nt, artificial
  Chemically synthesized
acagaaguaucuuuuuaaaaaga

SEQ ID NO: 39288 - RNA, 23 nt, artificial
  Chemically synthesized
agcacacugaucacacgauucuc

SEQ ID NO: 39289 - RNA, 23 nt, artificial
  Chemically synthesized
ugacuucuaaaacuguuaauaua

SEQ ID NO: 39290 - RNA, 23 nt, artificial
  Chemically synthesized
aaaaauacucugguugcaagaaa

SEQ ID NO: 39291 - RNA, 23 nt, artificial
  Chemically synthesized
aaacaagugaaacaaacaaaaca

SEQ ID NO: 39292 - RNA, 23 nt, artificial
  Chemically synthesized
auccuccacgcuugcucugaaga

SEQ ID NO: 39293 - RNA, 23 nt, artificial
  Chemically synthesized
aguaguuuagcuguuggaaaaau

SEQ ID NO: 39294 - RNA, 23 nt, artificial
  Chemically synthesized
agagaaagcaaaucuguacaaaa

SEQ ID NO: 39295 - RNA, 23 nt, artificial
  Chemically synthesized
acugcagugaacaagcaaaggca

SEQ ID NO: 39296 - RNA, 23 nt, artificial
  Chemically synthesized
accuauuuuaaagaagguaaaau

SEQ ID NO: 39297 - RNA, 23 nt, artificial
  Chemically synthesized
aaauacucugguugcaagaaaag

SEQ ID NO: 39298 - RNA, 23 nt, artificial
  Chemically synthesized
cacugcaaaugacucagugauac

SEQ ID NO: 39299 - RNA, 23 nt, artificial
  Chemically synthesized
aaucgcaaagccugaggaauuaa

SEQ ID NO: 39300 - RNA, 23 nt, artificial
  Chemically synthesized
aaagcaaaucuguacaaaaauac

SEQ ID NO: 39301 - RNA, 23 nt, artificial
  Chemically synthesized
ccuauuuuaaagaagguaaaauu

SEQ ID NO: 39302 - RNA, 23 nt, artificial
  Chemically synthesized
agcuccaacaaccuauuuuaaag

SEQ ID NO: 39303 - RNA, 23 nt, artificial
  Chemically synthesized
cucacuccaagagaagauguaga

SEQ ID NO: 39304 - RNA, 23 nt, artificial
  Chemically synthesized
ggaaaaauaagagcauuuaauuu

SEQ ID NO: 39305 - RNA, 23 nt, artificial
  Chemically synthesized
uacugacuucuaaaacuguuaau

SEQ ID NO: 39306 - RNA, 23 nt, artificial
  Chemically synthesized
ucaacaaaaacaacaaagaaaaa

SEQ ID NO: 39307 - RNA, 23 nt, artificial
  Chemically synthesized
aaaaccucuccuuacaaaauaaa

SEQ ID NO: 39308 - RNA, 23 nt, artificial
  Chemically synthesized
aaaauacucugguugcaagaaaa

SEQ ID NO: 39309 - RNA, 23 nt, artificial
  Chemically synthesized
gacaaaaaggcauuuauacaaau

SEQ ID NO: 39310 - RNA, 23 nt, artificial
  Chemically synthesized
aggaaaugcacuaaaagagugca

SEQ ID NO: 39311 - RNA, 23 nt, artificial
  Chemically synthesized
aaagcuccaacaaccuauuuuaa

SEQ ID NO: 39312 - RNA, 23 nt, artificial
  Chemically synthesized
aguccaaacaggcagagagauuu

SEQ ID NO: 39313 - RNA, 23 nt, artificial
  Chemically synthesized
cacaguacauacuaaaaauauuu

SEQ ID NO: 39314 - RNA, 23 nt, artificial
  Chemically synthesized
gcacacuguucaacuaagaguag

SEQ ID NO: 39315 - RNA, 23 nt, artificial
  Chemically synthesized
aaugcacuaaaagagugcaaaug

SEQ ID NO: 39316 - RNA, 23 nt, artificial
  Chemically synthesized
uacucccauaauugcaaaauaag

SEQ ID NO: 39317 - RNA, 23 nt, artificial
  Chemically synthesized
agggugaggaauacaaagaaacu

SEQ ID NO: 39318 - RNA, 23 nt, artificial
  Chemically synthesized
acaaagaaacuugcuuuuaauaa

SEQ ID NO: 39319 - RNA, 23 nt, artificial
  Chemically synthesized
gacugcagugaacaagcaaaggc

SEQ ID NO: 39320 - RNA, 23 nt, artificial
  Chemically synthesized
aaaaaggcauuuauacaaaucua

SEQ ID NO: 39321 - RNA, 23 nt, artificial
  Chemically synthesized
acuccaagagaagauguagagaa

SEQ ID NO: 39322 - RNA, 23 nt, artificial
  Chemically synthesized
aaaguccaaacaggcagagagau

SEQ ID NO: 39323 - RNA, 23 nt, artificial
  Chemically synthesized
aagagaaagcaaaucuguacaaa

SEQ ID NO: 39324 - RNA, 23 nt, artificial
  Chemically synthesized
aggaggaaaugcacuaaaagagu

SEQ ID NO: 39325 - RNA, 23 nt, artificial
  Chemically synthesized
accuaaagacaaaauaugauuua

SEQ ID NO: 39326 - RNA, 23 nt, artificial
  Chemically synthesized
aaugcgcuuggauaggucauguu

SEQ ID NO: 39327 - RNA, 23 nt, artificial
  Chemically synthesized
cucucauuuauacaaaaaaagaa

SEQ ID NO: 39328 - RNA, 23 nt, artificial
  Chemically synthesized
acagaggacuuuuuucuuuaauu

SEQ ID NO: 39329 - RNA, 23 nt, artificial
  Chemically synthesized
aggcagcuccuccuuaaaucgca

SEQ ID NO: 39330 - RNA, 23 nt, artificial
  Chemically synthesized
ccucacuccaagagaagauguag

SEQ ID NO: 39331 - RNA, 23 nt, artificial
  Chemically synthesized
aaaugcacuaaaagagugcaaau

SEQ ID NO: 39332 - RNA, 23 nt, artificial
  Chemically synthesized
ucacuccaagagaagauguagag

SEQ ID NO: 39333 - RNA, 23 nt, artificial
  Chemically synthesized
cuacugacuucuaaaacuguuaa

SEQ ID NO: 39334 - RNA, 23 nt, artificial
  Chemically synthesized
ccaacaaccuauuuuaaagaagg

SEQ ID NO: 39335 - RNA, 23 nt, artificial
  Chemically synthesized
ggaggaaaugcacuaaaagagug

SEQ ID NO: 39336 - RNA, 23 nt, artificial
  Chemically synthesized
gaaguaucuuuuuaaaaagaucu

SEQ ID NO: 39337 - RNA, 23 nt, artificial
  Chemically synthesized
cugggagggaaacaagugaaaca

SEQ ID NO: 39338 - RNA, 23 nt, artificial
  Chemically synthesized
gaaagcuccaacaaccuauuuua

SEQ ID NO: 39339 - RNA, 23 nt, artificial
  Chemically synthesized
uagucguacugugagcgggugau

SEQ ID NO: 39340 - RNA, 23 nt, artificial
  Chemically synthesized
aaggcaggaggaaaugcacuaaa

SEQ ID NO: 39341 - RNA, 23 nt, artificial
  Chemically synthesized
aaaccaaagcuuuuaccuaaaga

SEQ ID NO: 39342 - RNA, 23 nt, artificial
  Chemically synthesized
gcugggagggaaacaagugaaac

SEQ ID NO: 39343 - RNA, 23 nt, artificial
  Chemically synthesized
cccagaacagauuucaucuccuu

SEQ ID NO: 39344 - RNA, 23 nt, artificial
  Chemically synthesized
ggcagcuccuccuuaaaucgcaa

SEQ ID NO: 39345 - RNA, 23 nt, artificial
  Chemically synthesized
gcaaaggcaggaggaaaugcacu

SEQ ID NO: 39346 - RNA, 23 nt, artificial
  Chemically synthesized
caaaccaaagcuuuuaccuaaag

SEQ ID NO: 39347 - RNA, 23 nt, artificial
  Chemically synthesized
cacaauucuguuuuuaaauguua

SEQ ID NO: 39348 - RNA, 23 nt, artificial
  Chemically synthesized
aagccugaggaauuaagcaaagu

SEQ ID NO: 39349 - RNA, 23 nt, artificial
  Chemically synthesized
gggugaggaauacaaagaaacuu

SEQ ID NO: 39350 - RNA, 23 nt, artificial
  Chemically synthesized
aagcaaaucuguacaaaaauacu

SEQ ID NO: 39351 - RNA, 23 nt, artificial
  Chemically synthesized
acaaccuauuuuaaagaagguaa

SEQ ID NO: 39352 - RNA, 23 nt, artificial
  Chemically synthesized
ggagggaaacaagugaaacaaac

SEQ ID NO: 39353 - RNA, 23 nt, artificial
  Chemically synthesized
agggauggacaaaaaggcauuua

SEQ ID NO: 39354 - RNA, 23 nt, artificial
  Chemically synthesized
cacacuguucaacuaagaguagu

SEQ ID NO: 39355 - RNA, 23 nt, artificial
  Chemically synthesized
caaaaaggcauuuauacaaaucu

SEQ ID NO: 39356 - RNA, 23 nt, artificial
  Chemically synthesized
aagcaaaggcaggaggaaaugca

SEQ ID NO: 39357 - RNA, 23 nt, artificial
  Chemically synthesized
aaagguaaguuucacggagagaa

SEQ ID NO: 39358 - RNA, 23 nt, artificial
  Chemically synthesized
gugaacaagcaaaggcaggagga

SEQ ID NO: 39359 - RNA, 23 nt, artificial
  Chemically synthesized
cacgcuugcucugaagaggguuu

SEQ ID NO: 39360 - RNA, 23 nt, artificial
  Chemically synthesized
agggaaacaagugaaacaaacaa

SEQ ID NO: 39361 - RNA, 23 nt, artificial
  Chemically synthesized
gcucugaagaggguuuaaaaagu

SEQ ID NO: 39362 - RNA, 23 nt, artificial
  Chemically synthesized
gaggaaagcuccaacaaccuauu

SEQ ID NO: 39363 - RNA, 23 nt, artificial
  Chemically synthesized
cuugcucugaagaggguuuaaaa

SEQ ID NO: 39364 - RNA, 23 nt, artificial
  Chemically synthesized
ugaacaagcaaaggcaggaggaa

SEQ ID NO: 39365 - RNA, 23 nt, artificial
  Chemically synthesized
aaguccaaacaggcagagagauu

SEQ ID NO: 39366 - RNA, 23 nt, artificial
  Chemically synthesized
acaacaaagaaaaaagggaugga

SEQ ID NO: 39367 - RNA, 23 nt, artificial
  Chemically synthesized
acaagcaaaggcaggaggaaaug

SEQ ID NO: 39368 - RNA, 23 nt, artificial
  Chemically synthesized
caggaggaaaugcacuaaaagag

SEQ ID NO: 39369 - RNA, 23 nt, artificial
  Chemically synthesized
ggaggaagucggugaagaacggg

SEQ ID NO: 39370 - RNA, 23 nt, artificial
  Chemically synthesized
cggaggaagucggugaagaacgg

SEQ ID NO: 39371 - RNA, 23 nt, artificial
  Chemically synthesized
gcggaggaagucggugaagaacg

SEQ ID NO: 39372 - RNA, 23 nt, artificial
  Chemically synthesized
ggcggaggaagucggugaagaac

SEQ ID NO: 39373 - RNA, 23 nt, artificial
  Chemically synthesized
cggcggaggaagucggugaagaa

SEQ ID NO: 39374 - RNA, 23 nt, artificial
  Chemically synthesized
gcguggaggaugauggagaaucg

SEQ ID NO: 39375 - RNA, 23 nt, artificial
  Chemically synthesized
agcguggaggaugauggagaauc

SEQ ID NO: 39376 - RNA, 23 nt, artificial
  Chemically synthesized
cgagaaacuggacuuuuuaaacc

SEQ ID NO: 39377 - RNA, 23 nt, artificial
  Chemically synthesized
acgagaaacuggacuuuuuaaac

SEQ ID NO: 39378 - RNA, 23 nt, artificial
  Chemically synthesized
ggagagguuuuaauuaaaacaaa

SEQ ID NO: 39379 - RNA, 23 nt, artificial
  Chemically synthesized
aggagagguuuuaauuaaaacaa

SEQ ID NO: 39380 - RNA, 23 nt, artificial
  Chemically synthesized
aaggagagguuuuaauuaaaaca

SEQ ID NO: 39381 - RNA, 23 nt, artificial
  Chemically synthesized
uaaggagagguuuuaauuaaaac

SEQ ID NO: 39382 - RNA, 23 nt, artificial
  Chemically synthesized
guaaggagagguuuuaauuaaaa

SEQ ID NO: 39383 - RNA, 23 nt, artificial
  Chemically synthesized
agcucgaaacugacuggaaacuu

SEQ ID NO: 39384 - RNA, 23 nt, artificial
  Chemically synthesized
gagcucgaaacugacuggaaacu

SEQ ID NO: 39385 - RNA, 23 nt, artificial
  Chemically synthesized
uguaaggagagguuuuaauuaaa

SEQ ID NO: 39386 - RNA, 23 nt, artificial
  Chemically synthesized
gagaaacuggacuuuuuaaaccc

SEQ ID NO: 39387 - RNA, 23 nt, artificial
  Chemically synthesized
ggaauauucucuauuuuaaauau

SEQ ID NO: 39388 - RNA, 23 nt, artificial
  Chemically synthesized
aggaauauucucuauuuuaaaua

SEQ ID NO: 39389 - RNA, 23 nt, artificial
  Chemically synthesized
gaggaauauucucuauuuuaaau

SEQ ID NO: 39390 - RNA, 23 nt, artificial
  Chemically synthesized
ugaggaauauucucuauuuuaaa

SEQ ID NO: 39391 - RNA, 23 nt, artificial
  Chemically synthesized
gugaggaauauucucuauuuuaa

SEQ ID NO: 39392 - RNA, 23 nt, artificial
  Chemically synthesized
agcaguaauuaaagaaaaaaguc

SEQ ID NO: 39393 - RNA, 23 nt, artificial
  Chemically synthesized
uagcaguaauuaaagaaaaaagu

SEQ ID NO: 39394 - RNA, 23 nt, artificial
  Chemically synthesized
uuagcaguaauuaaagaaaaaag

SEQ ID NO: 39395 - RNA, 23 nt, artificial
  Chemically synthesized
uuuagcaguaauuaaagaaaaaa

SEQ ID NO: 39396 - RNA, 23 nt, artificial
  Chemically synthesized
uuuuagcaguaauuaaagaaaaa

SEQ ID NO: 39397 - RNA, 23 nt, artificial
  Chemically synthesized
gugugaucagugugcuaaaucuc

SEQ ID NO: 39398 - RNA, 23 nt, artificial
  Chemically synthesized
ucgugugaucagugugcuaaauc

SEQ ID NO: 39399 - RNA, 23 nt, artificial
  Chemically synthesized
aucgugugaucagugugcuaaau

SEQ ID NO: 39400 - RNA, 23 nt, artificial
  Chemically synthesized
agaagucaguagaauaaaaucuu

SEQ ID NO: 39401 - RNA, 23 nt, artificial
  Chemically synthesized
uagaagucaguagaauaaaaucu

SEQ ID NO: 39402 - RNA, 23 nt, artificial
  Chemically synthesized
uuagaagucaguagaauaaaauc

SEQ ID NO: 39403 - RNA, 23 nt, artificial
  Chemically synthesized
uuuagaagucaguagaauaaaau

SEQ ID NO: 39404 - RNA, 23 nt, artificial
  Chemically synthesized
uuuuagaagucaguagaauaaaa

SEQ ID NO: 39405 - RNA, 23 nt, artificial
  Chemically synthesized
ccaccuucaccuacaugaacccc

SEQ ID NO: 39406 - RNA, 23 nt, artificial
  Chemically synthesized
uccaccuucaccuacaugaaccc

SEQ ID NO: 39407 - RNA, 23 nt, artificial
  Chemically synthesized
cuccaccuucaccuacaugaacc

SEQ ID NO: 39408 - RNA, 23 nt, artificial
  Chemically synthesized
acuccaccuucaccuacaugaac

SEQ ID NO: 39409 - RNA, 23 nt, artificial
  Chemically synthesized
uacuccaccuucaccuacaugaa

SEQ ID NO: 39410 - RNA, 23 nt, artificial
  Chemically synthesized
gagcugccuuaaaaaaaaauaaa

SEQ ID NO: 39411 - RNA, 23 nt, artificial
  Chemically synthesized
cagcgaaaucaacgagaaacugg

SEQ ID NO: 39412 - RNA, 23 nt, artificial
  Chemically synthesized
gcagcgaaaucaacgagaaacug

SEQ ID NO: 39413 - RNA, 23 nt, artificial
  Chemically synthesized
cagcgaacgcacaucaagacgga

SEQ ID NO: 39414 - RNA, 23 nt, artificial
  Chemically synthesized
ccagcgaacgcacaucaagacgg

SEQ ID NO: 39415 - RNA, 23 nt, artificial
  Chemically synthesized
cccagcgaacgcacaucaagacg

SEQ ID NO: 39416 - RNA, 23 nt, artificial
  Chemically synthesized
ucccagcgaacgcacaucaagac

SEQ ID NO: 39417 - RNA, 23 nt, artificial
  Chemically synthesized
gucccagcgaacgcacaucaaga

SEQ ID NO: 39418 - RNA, 23 nt, artificial
  Chemically synthesized
ugggaguaaacaauagucuagag

SEQ ID NO: 39419 - RNA, 23 nt, artificial
  Chemically synthesized
uaugggaguaaacaauagucuag

SEQ ID NO: 39420 - RNA, 23 nt, artificial
  Chemically synthesized
uuaugggaguaaacaauagucua

SEQ ID NO: 39421 - RNA, 23 nt, artificial
  Chemically synthesized
aagagguaaaaggcaagcaaagg

SEQ ID NO: 39422 - RNA, 23 nt, artificial
  Chemically synthesized
aaagagguaaaaggcaagcaaag

SEQ ID NO: 39423 - RNA, 23 nt, artificial
  Chemically synthesized
cuucaauuucuguauaaaagcag

SEQ ID NO: 39424 - RNA, 23 nt, artificial
  Chemically synthesized
uccuucaauuucuguauaaaagc

SEQ ID NO: 39425 - RNA, 23 nt, artificial
  Chemically synthesized
auccuucaauuucuguauaaaag

SEQ ID NO: 39426 - RNA, 23 nt, artificial
  Chemically synthesized
cauccuucaauuucuguauaaaa

SEQ ID NO: 39427 - RNA, 23 nt, artificial
  Chemically synthesized
cacccuagauuuguauaaaugcc

SEQ ID NO: 39428 - RNA, 23 nt, artificial
  Chemically synthesized
ucacccuagauuuguauaaaugc

SEQ ID NO: 39429 - RNA, 23 nt, artificial
  Chemically synthesized
cucacccuagauuuguauaaaug

SEQ ID NO: 39430 - RNA, 23 nt, artificial
  Chemically synthesized
ccuucaaccucccacacuacagc

SEQ ID NO: 39431 - RNA, 23 nt, artificial
  Chemically synthesized
cccuucaaccucccacacuacag

SEQ ID NO: 39432 - RNA, 23 nt, artificial
  Chemically synthesized
ccccuucaaccucccacacuaca

SEQ ID NO: 39433 - RNA, 23 nt, artificial
  Chemically synthesized
gccccuucaaccucccacacuac

SEQ ID NO: 39434 - RNA, 23 nt, artificial
  Chemically synthesized
agccccuucaaccucccacacua

SEQ ID NO: 39435 - RNA, 23 nt, artificial
  Chemically synthesized
cugccuuaaaaaaaaauaaaggc

SEQ ID NO: 39436 - RNA, 23 nt, artificial
  Chemically synthesized
gcugccuuaaaaaaaaauaaagg

SEQ ID NO: 39437 - RNA, 23 nt, artificial
  Chemically synthesized
agcugccuuaaaaaaaaauaaag

SEQ ID NO: 39438 - RNA, 23 nt, artificial
  Chemically synthesized
ucuuccuuaaagacauuuaagcu

SEQ ID NO: 39439 - RNA, 23 nt, artificial
  Chemically synthesized
uucuuccuuaaagacauuuaagc

SEQ ID NO: 39440 - RNA, 23 nt, artificial
  Chemically synthesized
cuucuuccuuaaagacauuuaag

SEQ ID NO: 39441 - RNA, 23 nt, artificial
  Chemically synthesized
ucuucuuccuuaaagacauuuaa

SEQ ID NO: 39442 - RNA, 23 nt, artificial
  Chemically synthesized
ugguaagcuuuaucauauauaua

SEQ ID NO: 39443 - RNA, 23 nt, artificial
  Chemically synthesized
uugguaagcuuuaucauauauau

SEQ ID NO: 39444 - RNA, 23 nt, artificial
  Chemically synthesized
uuugguaagcuuuaucauauaua

SEQ ID NO: 39445 - RNA, 23 nt, artificial
  Chemically synthesized
auuugguaagcuuuaucauauau

SEQ ID NO: 39446 - RNA, 23 nt, artificial
  Chemically synthesized
cauuugguaagcuuuaucauaua

SEQ ID NO: 39447 - RNA, 23 nt, artificial
  Chemically synthesized
ugccuguuuggacuuuguaauua

SEQ ID NO: 39448 - RNA, 23 nt, artificial
  Chemically synthesized
cagcccacugacagaccuuaauc

SEQ ID NO: 39449 - RNA, 23 nt, artificial
  Chemically synthesized
aucagcccacugacagaccuuaa

SEQ ID NO: 39450 - RNA, 23 nt, artificial
  Chemically synthesized
uuguaaggagagguuuuaauuaa

SEQ ID NO: 39451 - RNA, 23 nt, artificial
  Chemically synthesized
uaaauggagcagcgaaaucaacg

SEQ ID NO: 39452 - RNA, 23 nt, artificial
  Chemically synthesized
uguuuuuguugaaaacaaacugg

SEQ ID NO: 39453 - RNA, 23 nt, artificial
  Chemically synthesized
uuguuuuuguugaaaacaaacug

SEQ ID NO: 39454 - RNA, 23 nt, artificial
  Chemically synthesized
guuguuuuuguugaaaacaaacu

SEQ ID NO: 39455 - RNA, 23 nt, artificial
  Chemically synthesized
uguuguuuuuguugaaaacaaac

SEQ ID NO: 39456 - RNA, 23 nt, artificial
  Chemically synthesized
uuguuguuuuuguugaaaacaaa

SEQ ID NO: 39457 - RNA, 23 nt, artificial
  Chemically synthesized
gagcuuuccucaaaggguauggu

SEQ ID NO: 39458 - RNA, 23 nt, artificial
  Chemically synthesized
ggagcuuuccucaaaggguaugg

SEQ ID NO: 39459 - RNA, 23 nt, artificial
  Chemically synthesized
uggagcuuuccucaaaggguaug

SEQ ID NO: 39460 - RNA, 23 nt, artificial
  Chemically synthesized
uuggagcuuuccucaaaggguau

SEQ ID NO: 39461 - RNA, 23 nt, artificial
  Chemically synthesized
guuggagcuuuccucaaagggua

SEQ ID NO: 39462 - RNA, 23 nt, artificial
  Chemically synthesized
gagguuuuaauuaaaacaaaaaa

SEQ ID NO: 39463 - RNA, 23 nt, artificial
  Chemically synthesized
agagguuuuaauuaaaacaaaaa

SEQ ID NO: 39464 - RNA, 23 nt, artificial
  Chemically synthesized
gagagguuuuaauuaaaacaaaa

SEQ ID NO: 39465 - RNA, 23 nt, artificial
  Chemically synthesized
acggcuccagcaagaacaagccg

SEQ ID NO: 39466 - RNA, 23 nt, artificial
  Chemically synthesized
aacggcuccagcaagaacaagcc

SEQ ID NO: 39467 - RNA, 23 nt, artificial
  Chemically synthesized
caacggcuccagcaagaacaagc

SEQ ID NO: 39468 - RNA, 23 nt, artificial
  Chemically synthesized
ucaacggcuccagcaagaacaag

SEQ ID NO: 39469 - RNA, 23 nt, artificial
  Chemically synthesized
accgaagaaagagaggaccaacc

SEQ ID NO: 39470 - RNA, 23 nt, artificial
  Chemically synthesized
aaccgaagaaagagaggaccaac

SEQ ID NO: 39471 - RNA, 23 nt, artificial
  Chemically synthesized
agaacaagccgcacgucaagcgg

SEQ ID NO: 39472 - RNA, 23 nt, artificial
  Chemically synthesized
aagaacaagccgcacgucaagcg

SEQ ID NO: 39473 - RNA, 23 nt, artificial
  Chemically synthesized
caagaacaagccgcacgucaagc

SEQ ID NO: 39474 - RNA, 23 nt, artificial
  Chemically synthesized
gcaagaacaagccgcacgucaag

SEQ ID NO: 39475 - RNA, 23 nt, artificial
  Chemically synthesized
aagagaggaccaaccagaauucc

SEQ ID NO: 39476 - RNA, 23 nt, artificial
  Chemically synthesized
aaagagaggaccaaccagaauuc

SEQ ID NO: 39477 - RNA, 23 nt, artificial
  Chemically synthesized
caguagaauaaaaucuuaaagca

SEQ ID NO: 39478 - RNA, 23 nt, artificial
  Chemically synthesized
ucaguagaauaaaaucuuaaagc

SEQ ID NO: 39479 - RNA, 23 nt, artificial
  Chemically synthesized
gucaguagaauaaaaucuuaaag

SEQ ID NO: 39480 - RNA, 23 nt, artificial
  Chemically synthesized
agucaguagaauaaaaucuuaaa

SEQ ID NO: 39481 - RNA, 23 nt, artificial
  Chemically synthesized
aagucaguagaauaaaaucuuaa

SEQ ID NO: 39482 - RNA, 23 nt, artificial
  Chemically synthesized
uuuuuagcaguaauuaaagaaaa

SEQ ID NO: 39483 - RNA, 23 nt, artificial
  Chemically synthesized
agcucuggagacuucugaacgag

SEQ ID NO: 39484 - RNA, 23 nt, artificial
  Chemically synthesized
aagcucuggagacuucugaacga

SEQ ID NO: 39485 - RNA, 23 nt, artificial
  Chemically synthesized
caagcucuggagacuucugaacg

SEQ ID NO: 39486 - RNA, 23 nt, artificial
  Chemically synthesized
gcaagcucuggagacuucugaac

SEQ ID NO: 39487 - RNA, 23 nt, artificial
  Chemically synthesized
caauuuuaccuucuuuaaaauag

SEQ ID NO: 39488 - RNA, 23 nt, artificial
  Chemically synthesized
ccaauuuuaccuucuuuaaaaua

SEQ ID NO: 39489 - RNA, 23 nt, artificial
  Chemically synthesized
uccaauuuuaccuucuuuaaaau

SEQ ID NO: 39490 - RNA, 23 nt, artificial
  Chemically synthesized
uuccaauuuuaccuucuuuaaaa

SEQ ID NO: 39491 - RNA, 23 nt, artificial
  Chemically synthesized
uuuccaauuuuaccuucuuuaaa

SEQ ID NO: 39492 - RNA, 23 nt, artificial
  Chemically synthesized
agaaacuggacuuuuuaaacccu

SEQ ID NO: 39493 - RNA, 23 nt, artificial
  Chemically synthesized
agaugaaaucuguucugggaaug

SEQ ID NO: 39494 - RNA, 23 nt, artificial
  Chemically synthesized
uuuuccaauuuuaccuucuuuaa

SEQ ID NO: 39495 - RNA, 23 nt, artificial
  Chemically synthesized
cuguuguauuaacauuuaaaaac

SEQ ID NO: 39496 - RNA, 23 nt, artificial
  Chemically synthesized
ccuguuguauuaacauuuaaaaa

SEQ ID NO: 39497 - RNA, 23 nt, artificial
  Chemically synthesized
uccuguuguauuaacauuuaaaa

SEQ ID NO: 39498 - RNA, 23 nt, artificial
  Chemically synthesized
auccuguuguauuaacauuuaaa

SEQ ID NO: 39499 - RNA, 23 nt, artificial
  Chemically synthesized
aauccuguuguauuaacauuuaa

SEQ ID NO: 39500 - RNA, 23 nt, artificial
  Chemically synthesized
gcaguaauuaaagaaaaaagucc

SEQ ID NO: 39501 - RNA, 23 nt, artificial
  Chemically synthesized
aagcggagcucgaaacugacugg

SEQ ID NO: 39502 - RNA, 23 nt, artificial
  Chemically synthesized
aaagcggagcucgaaacugacug

SEQ ID NO: 39503 - RNA, 23 nt, artificial
  Chemically synthesized
cgaaagcggagcucgaaacugac

SEQ ID NO: 39504 - RNA, 23 nt, artificial
  Chemically synthesized
ccgaaagcggagcucgaaacuga

SEQ ID NO: 39505 - RNA, 23 nt, artificial
  Chemically synthesized
aaucuuaaagcacucauaauaug

SEQ ID NO: 39506 - RNA, 23 nt, artificial
  Chemically synthesized
aaaucuuaaagcacucauaauau

SEQ ID NO: 39507 - RNA, 23 nt, artificial
  Chemically synthesized
aaaaucuuaaagcacucauaaua

SEQ ID NO: 39508 - RNA, 23 nt, artificial
  Chemically synthesized
uaaaaucuuaaagcacucauaau

SEQ ID NO: 39509 - RNA, 23 nt, artificial
  Chemically synthesized
auaaaaucuuaaagcacucauaa

SEQ ID NO: 39510 - RNA, 23 nt, artificial
  Chemically synthesized
gcaagcguggaggaugauggaga

SEQ ID NO: 39511 - RNA, 23 nt, artificial
  Chemically synthesized
agcaagcguggaggaugauggag

SEQ ID NO: 39512 - RNA, 23 nt, artificial
  Chemically synthesized
gagcaagcguggaggaugaugga

SEQ ID NO: 39513 - RNA, 23 nt, artificial
  Chemically synthesized
agauacuucuguaacuuaagaaa

SEQ ID NO: 39514 - RNA, 23 nt, artificial
  Chemically synthesized
aagauacuucuguaacuuaagaa

SEQ ID NO: 39515 - RNA, 23 nt, artificial
  Chemically synthesized
aaagauacuucuguaacuuaaga

SEQ ID NO: 39516 - RNA, 23 nt, artificial
  Chemically synthesized
aaaagauacuucuguaacuuaag

SEQ ID NO: 39517 - RNA, 23 nt, artificial
  Chemically synthesized
aaaaagauacuucuguaacuuaa

SEQ ID NO: 39518 - RNA, 23 nt, artificial
  Chemically synthesized
aggaccacccggauuacaaguac

SEQ ID NO: 39519 - RNA, 23 nt, artificial
  Chemically synthesized
aaggaccacccggauuacaagua

SEQ ID NO: 39520 - RNA, 23 nt, artificial
  Chemically synthesized
aaaacggugcugcugggaaacau

SEQ ID NO: 39521 - RNA, 23 nt, artificial
  Chemically synthesized
uaaaacggugcugcugggaaaca

SEQ ID NO: 39522 - RNA, 23 nt, artificial
  Chemically synthesized
uuaaaacggugcugcugggaaac

SEQ ID NO: 39523 - RNA, 23 nt, artificial
  Chemically synthesized
cuuuguuguuuuuguugaaaaca

SEQ ID NO: 39524 - RNA, 23 nt, artificial
  Chemically synthesized
ucuuuguuguuuuuguugaaaac

SEQ ID NO: 39525 - RNA, 23 nt, artificial
  Chemically synthesized
uucuuuguuguuuuuguugaaaa

SEQ ID NO: 39526 - RNA, 23 nt, artificial
  Chemically synthesized
uuucuuuguuguuuuuguugaaa

SEQ ID NO: 39527 - RNA, 23 nt, artificial
  Chemically synthesized
uuuucuuuguuguuuuuguugaa

SEQ ID NO: 39528 - RNA, 23 nt, artificial
  Chemically synthesized
ccuuugggcugccuuauauugug

SEQ ID NO: 39529 - RNA, 23 nt, artificial
  Chemically synthesized
accuuugggcugccuuauauugu

SEQ ID NO: 39530 - RNA, 23 nt, artificial
  Chemically synthesized
gaccuuugggcugccuuauauug

SEQ ID NO: 39531 - RNA, 23 nt, artificial
  Chemically synthesized
agaccuuugggcugccuuauauu

SEQ ID NO: 39532 - RNA, 23 nt, artificial
  Chemically synthesized
aucaacgagaaacuggacuuuuu

SEQ ID NO: 39533 - RNA, 23 nt, artificial
  Chemically synthesized
ccccggaaacuuuucuuugcagg

SEQ ID NO: 39534 - RNA, 23 nt, artificial
  Chemically synthesized
accccggaaacuuuucuuugcag

SEQ ID NO: 39535 - RNA, 23 nt, artificial
  Chemically synthesized
aaccccggaaacuuuucuuugca

SEQ ID NO: 39536 - RNA, 23 nt, artificial
  Chemically synthesized
ugcccuagcuuuucuugcaacca

SEQ ID NO: 39537 - RNA, 23 nt, artificial
  Chemically synthesized
gugcccuagcuuuucuugcaacc

SEQ ID NO: 39538 - RNA, 23 nt, artificial
  Chemically synthesized
ugugcccuagcuuuucuugcaac

SEQ ID NO: 39539 - RNA, 23 nt, artificial
  Chemically synthesized
aaaagcagaucuuuuuaaaaaga

SEQ ID NO: 39540 - RNA, 23 nt, artificial
  Chemically synthesized
uaaaagcagaucuuuuuaaaaag

SEQ ID NO: 39541 - RNA, 23 nt, artificial
  Chemically synthesized
auaaaagcagaucuuuuuaaaaa

SEQ ID NO: 39542 - RNA, 23 nt, artificial
  Chemically synthesized
uauaaaagcagaucuuuuuaaaa

SEQ ID NO: 39543 - RNA, 23 nt, artificial
  Chemically synthesized
guauaaaagcagaucuuuuuaaa

SEQ ID NO: 39544 - RNA, 23 nt, artificial
  Chemically synthesized
uuccucacccuagauuuguauaa

SEQ ID NO: 39545 - RNA, 23 nt, artificial
  Chemically synthesized
gcggagcucgaaacugacuggaa

SEQ ID NO: 39546 - RNA, 23 nt, artificial
  Chemically synthesized
aauaaaaucuuaaagcacucaua

SEQ ID NO: 39547 - RNA, 23 nt, artificial
  Chemically synthesized
aaagcagaucuuuuuaaaaagau

SEQ ID NO: 39548 - RNA, 23 nt, artificial
  Chemically synthesized
gaacgcacaucaagacggagcag

SEQ ID NO: 39549 - RNA, 23 nt, artificial
  Chemically synthesized
cgaacgcacaucaagacggagca

SEQ ID NO: 39550 - RNA, 23 nt, artificial
  Chemically synthesized
gcgaacgcacaucaagacggagc

SEQ ID NO: 39551 - RNA, 23 nt, artificial
  Chemically synthesized
agcgaacgcacaucaagacggag

SEQ ID NO: 39552 - RNA, 23 nt, artificial
  Chemically synthesized
ggcuaaauggagcagcgaaauca

SEQ ID NO: 39553 - RNA, 23 nt, artificial
  Chemically synthesized
uggcuaaauggagcagcgaaauc

SEQ ID NO: 39554 - RNA, 23 nt, artificial
  Chemically synthesized
uuggcuaaauggagcagcgaaau

SEQ ID NO: 39555 - RNA, 23 nt, artificial
  Chemically synthesized
ccacagaccuuugggcugccuua

SEQ ID NO: 39556 - RNA, 23 nt, artificial
  Chemically synthesized
uuguauuccucacccuagauuug

SEQ ID NO: 39557 - RNA, 23 nt, artificial
  Chemically synthesized
uuuguauuccucacccuagauuu

SEQ ID NO: 39558 - RNA, 23 nt, artificial
  Chemically synthesized
uucuuuguauuccucacccuaga

SEQ ID NO: 39559 - RNA, 23 nt, artificial
  Chemically synthesized
ggcaagcaaaggagaugaaaucu

SEQ ID NO: 39560 - RNA, 23 nt, artificial
  Chemically synthesized
uuguuggagcuuuccucaaaggg

SEQ ID NO: 39561 - RNA, 23 nt, artificial
  Chemically synthesized
guuguuggagcuuuccucaaagg

SEQ ID NO: 39562 - RNA, 23 nt, artificial
  Chemically synthesized
gguuguuggagcuuuccucaaag

SEQ ID NO: 39563 - RNA, 23 nt, artificial
  Chemically synthesized
ccuugagccuuaaaacggugcug

SEQ ID NO: 39564 - RNA, 23 nt, artificial
  Chemically synthesized
accuugagccuuaaaacggugcu

SEQ ID NO: 39565 - RNA, 23 nt, artificial
  Chemically synthesized
caccuugagccuuaaaacggugc

SEQ ID NO: 39566 - RNA, 23 nt, artificial
  Chemically synthesized
acaccuugagccuuaaaacggug

SEQ ID NO: 39567 - RNA, 23 nt, artificial
  Chemically synthesized
aacaccuugagccuuaaaacggu

SEQ ID NO: 39568 - RNA, 23 nt, artificial
  Chemically synthesized
uuaaagacauuuaagcuaaaggc

SEQ ID NO: 39569 - RNA, 23 nt, artificial
  Chemically synthesized
cuuaaagacauuuaagcuaaagg

SEQ ID NO: 39570 - RNA, 23 nt, artificial
  Chemically synthesized
uccuuaaagacauuuaagcuaaa

SEQ ID NO: 39571 - RNA, 23 nt, artificial
  Chemically synthesized
gcaaccagaguauuuuuguacag

SEQ ID NO: 39572 - RNA, 23 nt, artificial
  Chemically synthesized
uugcaaccagaguauuuuuguac

SEQ ID NO: 39573 - RNA, 23 nt, artificial
  Chemically synthesized
auccuaaaaauaaccgaagaaag

SEQ ID NO: 39574 - RNA, 23 nt, artificial
  Chemically synthesized
aaggccuuauuuugcaauuaugg

SEQ ID NO: 39575 - RNA, 23 nt, artificial
  Chemically synthesized
aaaggccuuauuuugcaauuaug

SEQ ID NO: 39576 - RNA, 23 nt, artificial
  Chemically synthesized
uaaaggccuuauuuugcaauuau

SEQ ID NO: 39577 - RNA, 23 nt, artificial
  Chemically synthesized
cgcguaugaaucuccuggacccc

SEQ ID NO: 39578 - RNA, 23 nt, artificial
  Chemically synthesized
ccgcguaugaaucuccuggaccc

SEQ ID NO: 39579 - RNA, 23 nt, artificial
  Chemically synthesized
cccgcguaugaaucuccuggacc

SEQ ID NO: 39580 - RNA, 23 nt, artificial
  Chemically synthesized
gcccgcguaugaaucuccuggac

SEQ ID NO: 39581 - RNA, 23 nt, artificial
  Chemically synthesized
ggcccgcguaugaaucuccugga

SEQ ID NO: 39582 - RNA, 23 nt, artificial
  Chemically synthesized
aagaaagagguaaaaggcaagca

SEQ ID NO: 39583 - RNA, 23 nt, artificial
  Chemically synthesized
uaagaaagagguaaaaggcaagc

SEQ ID NO: 39584 - RNA, 23 nt, artificial
  Chemically synthesized
uuaagaaagagguaaaaggcaag

SEQ ID NO: 39585 - RNA, 23 nt, artificial
  Chemically synthesized
aaauccuguuguauuaacauuua

SEQ ID NO: 39586 - RNA, 23 nt, artificial
  Chemically synthesized
gcagaucuuuuuaaaaagauacu

SEQ ID NO: 39587 - RNA, 23 nt, artificial
  Chemically synthesized
agcagaucuuuuuaaaaagauac

SEQ ID NO: 39588 - RNA, 23 nt, artificial
  Chemically synthesized
aagcagaucuuuuuaaaaagaua

SEQ ID NO: 39589 - RNA, 23 nt, artificial
  Chemically synthesized
aaaacaccuugagccuuaaaacg

SEQ ID NO: 39590 - RNA, 23 nt, artificial
  Chemically synthesized
aaaaacaccuugagccuuaaaac

SEQ ID NO: 39591 - RNA, 23 nt, artificial
  Chemically synthesized
cgcucacaguacgacuacaccga

SEQ ID NO: 39592 - RNA, 23 nt, artificial
  Chemically synthesized
ccgcucacaguacgacuacaccg

SEQ ID NO: 39593 - RNA, 23 nt, artificial
  Chemically synthesized
cccgcucacaguacgacuacacc

SEQ ID NO: 39594 - RNA, 23 nt, artificial
  Chemically synthesized
acccgcucacaguacgacuacac

SEQ ID NO: 39595 - RNA, 23 nt, artificial
  Chemically synthesized
cacccgcucacaguacgacuaca

SEQ ID NO: 39596 - RNA, 23 nt, artificial
  Chemically synthesized
ccuuggcuaaauggagcagcgaa

SEQ ID NO: 39597 - RNA, 23 nt, artificial
  Chemically synthesized
ccucaaaggguauggucaucugu

SEQ ID NO: 39598 - RNA, 23 nt, artificial
  Chemically synthesized
uccucaaaggguauggucaucug

SEQ ID NO: 39599 - RNA, 23 nt, artificial
  Chemically synthesized
uuccucaaaggguauggucaucu

SEQ ID NO: 39600 - RNA, 23 nt, artificial
  Chemically synthesized
uuuccucaaaggguauggucauc

SEQ ID NO: 39601 - RNA, 23 nt, artificial
  Chemically synthesized
ucagaacaccagcaguuaaccuu

SEQ ID NO: 39602 - RNA, 23 nt, artificial
  Chemically synthesized
cucagaacaccagcaguuaaccu

SEQ ID NO: 39603 - RNA, 23 nt, artificial
  Chemically synthesized
ucucagaacaccagcaguuaacc

SEQ ID NO: 39604 - RNA, 23 nt, artificial
  Chemically synthesized
gggguuaacuuugcuuaauuccu

SEQ ID NO: 39605 - RNA, 23 nt, artificial
  Chemically synthesized
ggggguuaacuuugcuuaauucc

SEQ ID NO: 39606 - RNA, 23 nt, artificial
  Chemically synthesized
uggggguuaacuuugcuuaauuc

SEQ ID NO: 39607 - RNA, 23 nt, artificial
  Chemically synthesized
uuggggguuaacuuugcuuaauu

SEQ ID NO: 39608 - RNA, 23 nt, artificial
  Chemically synthesized
gucauccauauuucucuacaucu

SEQ ID NO: 39609 - RNA, 23 nt, artificial
  Chemically synthesized
ugucauccauauuucucuacauc

SEQ ID NO: 39610 - RNA, 23 nt, artificial
  Chemically synthesized
uuguugaaaacaaacuggaaacu

SEQ ID NO: 39611 - RNA, 23 nt, artificial
  Chemically synthesized
uuuguugaaaacaaacuggaaac

SEQ ID NO: 39612 - RNA, 23 nt, artificial
  Chemically synthesized
uuuuguugaaaacaaacuggaaa

SEQ ID NO: 39613 - RNA, 23 nt, artificial
  Chemically synthesized
uuuuuguugaaaacaaacuggaa

SEQ ID NO: 39614 - RNA, 23 nt, artificial
  Chemically synthesized
aagaagagaaaaacaccuugagc

SEQ ID NO: 39615 - RNA, 23 nt, artificial
  Chemically synthesized
acccuagauuuguauaaaugccu

SEQ ID NO: 39616 - RNA, 23 nt, artificial
  Chemically synthesized
gaagucaguagaauaaaaucuua

SEQ ID NO: 39617 - RNA, 23 nt, artificial
  Chemically synthesized
ugaagaugaccgacgagcaggag

SEQ ID NO: 39618 - RNA, 23 nt, artificial
  Chemically synthesized
caugaagaugaccgacgagcagg

SEQ ID NO: 39619 - RNA, 23 nt, artificial
  Chemically synthesized
ucaugaagaugaccgacgagcag

SEQ ID NO: 39620 - RNA, 23 nt, artificial
  Chemically synthesized
uucaugaagaugaccgacgagca

SEQ ID NO: 39621 - RNA, 23 nt, artificial
  Chemically synthesized
gucuuaagaaagagguaaaaggc

SEQ ID NO: 39622 - RNA, 23 nt, artificial
  Chemically synthesized
agucuuaagaaagagguaaaagg

SEQ ID NO: 39623 - RNA, 23 nt, artificial
  Chemically synthesized
uggagaaucgugugaucagugug

SEQ ID NO: 39624 - RNA, 23 nt, artificial
  Chemically synthesized
aaaucaacgagaaacuggacuuu

SEQ ID NO: 39625 - RNA, 23 nt, artificial
  Chemically synthesized
uagcuuuucuugcaaccagagua

SEQ ID NO: 39626 - RNA, 23 nt, artificial
  Chemically synthesized
ccuagcuuuucuugcaaccagag

SEQ ID NO: 39627 - RNA, 23 nt, artificial
  Chemically synthesized
uuucuuuguauuccucacccuag

SEQ ID NO: 39628 - RNA, 23 nt, artificial
  Chemically synthesized
ccuucaugaagaugaccgacgag

SEQ ID NO: 39629 - RNA, 23 nt, artificial
  Chemically synthesized
cccuucaugaagaugaccgacga

SEQ ID NO: 39630 - RNA, 23 nt, artificial
  Chemically synthesized
ccccuucaugaagaugaccgacg

SEQ ID NO: 39631 - RNA, 23 nt, artificial
  Chemically synthesized
accccuucaugaagaugaccgac

SEQ ID NO: 39632 - RNA, 23 nt, artificial
  Chemically synthesized
gaccccuucaugaagaugaccga

SEQ ID NO: 39633 - RNA, 23 nt, artificial
  Chemically synthesized
augagagauugcaaauguagugu

SEQ ID NO: 39634 - RNA, 23 nt, artificial
  Chemically synthesized
aaugagagauugcaaauguagug

SEQ ID NO: 39635 - RNA, 23 nt, artificial
  Chemically synthesized
uaaaugagagauugcaaauguag

SEQ ID NO: 39636 - RNA, 23 nt, artificial
  Chemically synthesized
auaaaugagagauugcaaaugua

SEQ ID NO: 39637 - RNA, 23 nt, artificial
  Chemically synthesized
ucacugcagucuuaagaaagagg

SEQ ID NO: 39638 - RNA, 23 nt, artificial
  Chemically synthesized
uucacugcagucuuaagaaagag

SEQ ID NO: 39639 - RNA, 23 nt, artificial
  Chemically synthesized
uccucaggcuuugcgauuuaagg

SEQ ID NO: 39640 - RNA, 23 nt, artificial
  Chemically synthesized
uuccucaggcuuugcgauuuaag

SEQ ID NO: 39641 - RNA, 23 nt, artificial
  Chemically synthesized
auuccucaggcuuugcgauuuaa

SEQ ID NO: 39642 - RNA, 23 nt, artificial
  Chemically synthesized
guguaugauucauuaccauuuug

SEQ ID NO: 39643 - RNA, 23 nt, artificial
  Chemically synthesized
uguguaugauucauuaccauuuu

SEQ ID NO: 39644 - RNA, 23 nt, artificial
  Chemically synthesized
acuguguaugauucauuaccauu

SEQ ID NO: 39645 - RNA, 23 nt, artificial
  Chemically synthesized
uacuguguaugauucauuaccau

SEQ ID NO: 39646 - RNA, 23 nt, artificial
  Chemically synthesized
cucaggcuuugcgauuuaaggag

SEQ ID NO: 39647 - RNA, 23 nt, artificial
  Chemically synthesized
caauaaauauacauugcauuaaa

SEQ ID NO: 39648 - RNA, 23 nt, artificial
  Chemically synthesized
acaauaaauauacauugcauuaa

SEQ ID NO: 39649 - RNA, 23 nt, artificial
  Chemically synthesized
uacaauaaauauacauugcauua

SEQ ID NO: 39650 - RNA, 23 nt, artificial
  Chemically synthesized
uuacaauaaauauacauugcauu

SEQ ID NO: 39651 - RNA, 23 nt, artificial
  Chemically synthesized
uuuacaauaaauauacauugcau

SEQ ID NO: 39652 - RNA, 23 nt, artificial
  Chemically synthesized
acucguacccaaauuuccaagac

SEQ ID NO: 39653 - RNA, 23 nt, artificial
  Chemically synthesized
acuucuguaacuuaagaaaccug

SEQ ID NO: 39654 - RNA, 23 nt, artificial
  Chemically synthesized
uacuucuguaacuuaagaaaccu

SEQ ID NO: 39655 - RNA, 23 nt, artificial
  Chemically synthesized
auacuucuguaacuuaagaaacc

SEQ ID NO: 39656 - RNA, 23 nt, artificial
  Chemically synthesized
gauacuucuguaacuuaagaaac

SEQ ID NO: 39657 - RNA, 23 nt, artificial
  Chemically synthesized
aggcuuugcgauuuaaggaggag

SEQ ID NO: 39658 - RNA, 23 nt, artificial
  Chemically synthesized
caggcuuugcgauuuaaggagga

SEQ ID NO: 39659 - RNA, 23 nt, artificial
  Chemically synthesized
ucaggcuuugcgauuuaaggagg

SEQ ID NO: 39660 - RNA, 23 nt, artificial
  Chemically synthesized
ggaccaaccagaauucccuuugg

SEQ ID NO: 39661 - RNA, 23 nt, artificial
  Chemically synthesized
aggaccaaccagaauucccuuug

SEQ ID NO: 39662 - RNA, 23 nt, artificial
  Chemically synthesized
gaggaccaaccagaauucccuuu

SEQ ID NO: 39663 - RNA, 23 nt, artificial
  Chemically synthesized
auauacauugcauuaaaaagaaa

SEQ ID NO: 39664 - RNA, 23 nt, artificial
  Chemically synthesized
cauauuuugucuuuagguaaaag

SEQ ID NO: 39665 - RNA, 23 nt, artificial
  Chemically synthesized
ucauauuuugucuuuagguaaaa

SEQ ID NO: 39666 - RNA, 23 nt, artificial
  Chemically synthesized
aucauauuuugucuuuagguaaa

SEQ ID NO: 39667 - RNA, 23 nt, artificial
  Chemically synthesized
aaucauauuuugucuuuagguaa

SEQ ID NO: 39668 - RNA, 23 nt, artificial
  Chemically synthesized
aaaucauauuuugucuuuaggua

SEQ ID NO: 39669 - RNA, 23 nt, artificial
  Chemically synthesized
cggugcugcugggaaacauuugc

SEQ ID NO: 39670 - RNA, 23 nt, artificial
  Chemically synthesized
acggugcugcugggaaacauuug

SEQ ID NO: 39671 - RNA, 23 nt, artificial
  Chemically synthesized
gcgacgucaucuccaacaucgag

SEQ ID NO: 39672 - RNA, 23 nt, artificial
  Chemically synthesized
agcgacgucaucuccaacaucga

SEQ ID NO: 39673 - RNA, 23 nt, artificial
  Chemically synthesized
cagcgacgucaucuccaacaucg

SEQ ID NO: 39674 - RNA, 23 nt, artificial
  Chemically synthesized
gcagcgacgucaucuccaacauc

SEQ ID NO: 39675 - RNA, 23 nt, artificial
  Chemically synthesized
agcagcgacgucaucuccaacau

SEQ ID NO: 39676 - RNA, 23 nt, artificial
  Chemically synthesized
ugcuuguucacugcagucuuaag

SEQ ID NO: 39677 - RNA, 23 nt, artificial
  Chemically synthesized
uugcuuguucacugcagucuuaa

SEQ ID NO: 39678 - RNA, 23 nt, artificial
  Chemically synthesized
ucuucuucuucuuccuuaaagac

SEQ ID NO: 39679 - RNA, 23 nt, artificial
  Chemically synthesized
uucuucuucuucuuccuuaaaga

SEQ ID NO: 39680 - RNA, 23 nt, artificial
  Chemically synthesized
cuucuucuucuucuuccuuaaag

SEQ ID NO: 39681 - RNA, 23 nt, artificial
  Chemically synthesized
ucuucuucuucuucuuccuuaaa

SEQ ID NO: 39682 - RNA, 23 nt, artificial
  Chemically synthesized
uucuucuucuucuucuuccuuaa

SEQ ID NO: 39683 - RNA, 23 nt, artificial
  Chemically synthesized
uuaguugaacagugugcccuagc

SEQ ID NO: 39684 - RNA, 23 nt, artificial
  Chemically synthesized
aaaaauaaccgaagaaagagagg

SEQ ID NO: 39685 - RNA, 23 nt, artificial
  Chemically synthesized
ucgagaccuucgaugucaacgag

SEQ ID NO: 39686 - RNA, 23 nt, artificial
  Chemically synthesized
aucgagaccuucgaugucaacga

SEQ ID NO: 39687 - RNA, 23 nt, artificial
  Chemically synthesized
caucgagaccuucgaugucaacg

SEQ ID NO: 39688 - RNA, 23 nt, artificial
  Chemically synthesized
acaucgagaccuucgaugucaac

SEQ ID NO: 39689 - RNA, 23 nt, artificial
  Chemically synthesized
aacaucgagaccuucgaugucaa

SEQ ID NO: 39690 - RNA, 23 nt, artificial
  Chemically synthesized
caauuucuguauaaaagcagauc

SEQ ID NO: 39691 - RNA, 23 nt, artificial
  Chemically synthesized
ucaauuucuguauaaaagcagau

SEQ ID NO: 39692 - RNA, 23 nt, artificial
  Chemically synthesized
uucaauuucuguauaaaagcaga

SEQ ID NO: 39693 - RNA, 23 nt, artificial
  Chemically synthesized
cuguucugggaauguuucagcag

SEQ ID NO: 39694 - RNA, 23 nt, artificial
  Chemically synthesized
ucuguucugggaauguuucagca

SEQ ID NO: 39695 - RNA, 23 nt, artificial
  Chemically synthesized
aucuguucugggaauguuucagc

SEQ ID NO: 39696 - RNA, 23 nt, artificial
  Chemically synthesized
aaucuguucugggaauguuucag

SEQ ID NO: 39697 - RNA, 23 nt, artificial
  Chemically synthesized
auuuugcaauuaugggaguaaac

SEQ ID NO: 39698 - RNA, 23 nt, artificial
  Chemically synthesized
uauuuugcaauuaugggaguaaa

SEQ ID NO: 39699 - RNA, 23 nt, artificial
  Chemically synthesized
aggcaacucguacccaaauuucc

SEQ ID NO: 39700 - RNA, 23 nt, artificial
  Chemically synthesized
guuuuagaagucaguagaauaaa

SEQ ID NO: 39701 - RNA, 23 nt, artificial
  Chemically synthesized
aguuuuagaagucaguagaauaa

SEQ ID NO: 39702 - RNA, 23 nt, artificial
  Chemically synthesized
uguggauguccaagcagcaggcg

SEQ ID NO: 39703 - RNA, 23 nt, artificial
  Chemically synthesized
guguggauguccaagcagcaggc

SEQ ID NO: 39704 - RNA, 23 nt, artificial
  Chemically synthesized
cguguggauguccaagcagcagg

SEQ ID NO: 39705 - RNA, 23 nt, artificial
  Chemically synthesized
acguguggauguccaagcagcag

SEQ ID NO: 39706 - RNA, 23 nt, artificial
  Chemically synthesized
cacguguggauguccaagcagca

SEQ ID NO: 39707 - RNA, 23 nt, artificial
  Chemically synthesized
aagcuaaaggcaacucguaccca

SEQ ID NO: 39708 - RNA, 23 nt, artificial
  Chemically synthesized
uaagcuaaaggcaacucguaccc

SEQ ID NO: 39709 - RNA, 23 nt, artificial
  Chemically synthesized
uuaagcuaaaggcaacucguacc

SEQ ID NO: 39710 - RNA, 23 nt, artificial
  Chemically synthesized
uuuaagcuaaaggcaacucguac

SEQ ID NO: 39711 - RNA, 23 nt, artificial
  Chemically synthesized
aacagcuaaacuacucuuaguug

SEQ ID NO: 39712 - RNA, 23 nt, artificial
  Chemically synthesized
caacagcuaaacuacucuuaguu

SEQ ID NO: 39713 - RNA, 23 nt, artificial
  Chemically synthesized
accagcaguuaaccuucaagaca

SEQ ID NO: 39714 - RNA, 23 nt, artificial
  Chemically synthesized
caccagcaguuaaccuucaagac

SEQ ID NO: 39715 - RNA, 23 nt, artificial
  Chemically synthesized
aaacugacuggaaacuucagugg

SEQ ID NO: 39716 - RNA, 23 nt, artificial
  Chemically synthesized
gaaacugacuggaaacuucagug

SEQ ID NO: 39717 - RNA, 23 nt, artificial
  Chemically synthesized
ucgaaacugacuggaaacuucag

SEQ ID NO: 39718 - RNA, 23 nt, artificial
  Chemically synthesized
uuuguaaggagagguuuuaauua

SEQ ID NO: 39719 - RNA, 23 nt, artificial
  Chemically synthesized
uuuuguaaggagagguuuuaauu

SEQ ID NO: 39720 - RNA, 23 nt, artificial
  Chemically synthesized
auuuuguaaggagagguuuuaau

SEQ ID NO: 39721 - RNA, 23 nt, artificial
  Chemically synthesized
uauuuuguaaggagagguuuuaa

SEQ ID NO: 39722 - RNA, 23 nt, artificial
  Chemically synthesized
ccaacaucgagaccuucgauguc

SEQ ID NO: 39723 - RNA, 23 nt, artificial
  Chemically synthesized
uccaacaucgagaccuucgaugu

SEQ ID NO: 39724 - RNA, 23 nt, artificial
  Chemically synthesized
cuccaacaucgagaccuucgaug

SEQ ID NO: 39725 - RNA, 23 nt, artificial
  Chemically synthesized
ucuccaacaucgagaccuucgau

SEQ ID NO: 39726 - RNA, 23 nt, artificial
  Chemically synthesized
aucuccaacaucgagaccuucga

SEQ ID NO: 39727 - RNA, 23 nt, artificial
  Chemically synthesized
aauauacauugcauuaaaaagaa

SEQ ID NO: 39728 - RNA, 23 nt, artificial
  Chemically synthesized
agcccgaucugaagaaggagagc

SEQ ID NO: 39729 - RNA, 23 nt, artificial
  Chemically synthesized
gagcccgaucugaagaaggagag

SEQ ID NO: 39730 - RNA, 23 nt, artificial
  Chemically synthesized
cgagcccgaucugaagaaggaga

SEQ ID NO: 39731 - RNA, 23 nt, artificial
  Chemically synthesized
gcgagcccgaucugaagaaggag

SEQ ID NO: 39732 - RNA, 23 nt, artificial
  Chemically synthesized
ggcgagcccgaucugaagaagga

SEQ ID NO: 39733 - RNA, 23 nt, artificial
  Chemically synthesized
ugugaggaauauucucuauuuua

SEQ ID NO: 39734 - RNA, 23 nt, artificial
  Chemically synthesized
auggucaucuguuguuaaauuau

SEQ ID NO: 39735 - RNA, 23 nt, artificial
  Chemically synthesized
uauggucaucuguuguuaaauua

SEQ ID NO: 39736 - RNA, 23 nt, artificial
  Chemically synthesized
aacaccagcaguuaaccuucaag

SEQ ID NO: 39737 - RNA, 23 nt, artificial
  Chemically synthesized
acuacaccgaccaccagaacucc

SEQ ID NO: 39738 - RNA, 23 nt, artificial
  Chemically synthesized
gacuacaccgaccaccagaacuc

SEQ ID NO: 39739 - RNA, 23 nt, artificial
  Chemically synthesized
cgacuacaccgaccaccagaacu

SEQ ID NO: 39740 - RNA, 23 nt, artificial
  Chemically synthesized
acgacuacaccgaccaccagaac

SEQ ID NO: 39741 - RNA, 23 nt, artificial
  Chemically synthesized
ucaacgaguuugaccaguaccug

SEQ ID NO: 39742 - RNA, 23 nt, artificial
  Chemically synthesized
gucaacgaguuugaccaguaccu

SEQ ID NO: 39743 - RNA, 23 nt, artificial
  Chemically synthesized
ugucaacgaguuugaccaguacc

SEQ ID NO: 39744 - RNA, 23 nt, artificial
  Chemically synthesized
augucaacgaguuugaccaguac

SEQ ID NO: 39745 - RNA, 23 nt, artificial
  Chemically synthesized
uggcuagagaguuugaggauugc

SEQ ID NO: 39746 - RNA, 23 nt, artificial
  Chemically synthesized
guggcuagagaguuugaggauug

SEQ ID NO: 39747 - RNA, 23 nt, artificial
  Chemically synthesized
uguggcuagagaguuugaggauu

SEQ ID NO: 39748 - RNA, 23 nt, artificial
  Chemically synthesized
aagaaaaaaguccucugugagga

SEQ ID NO: 39749 - RNA, 23 nt, artificial
  Chemically synthesized
aaagaaaaaaguccucugugagg

SEQ ID NO: 39750 - RNA, 23 nt, artificial
  Chemically synthesized
uaaagaaaaaaguccucugugag

SEQ ID NO: 39751 - RNA, 23 nt, artificial
  Chemically synthesized
uuaaagaaaaaaguccucuguga

SEQ ID NO: 39752 - RNA, 23 nt, artificial
  Chemically synthesized
aggaugauggagaaucgugugau

SEQ ID NO: 39753 - RNA, 23 nt, artificial
  Chemically synthesized
cuucaugaagaugaccgacgagc

SEQ ID NO: 39754 - RNA, 23 nt, artificial
  Chemically synthesized
aagcauuugguaagcuuuaucau

SEQ ID NO: 39755 - RNA, 23 nt, artificial
  Chemically synthesized
agaagcauuugguaagcuuuauc

SEQ ID NO: 39756 - RNA, 23 nt, artificial
  Chemically synthesized
gguaagcuuuaucauauauauau

SEQ ID NO: 39757 - RNA, 23 nt, artificial
  Chemically synthesized
ucuggagacuucugaacgagagc

SEQ ID NO: 39758 - RNA, 23 nt, artificial
  Chemically synthesized
cucuggagacuucugaacgagag

SEQ ID NO: 39759 - RNA, 23 nt, artificial
  Chemically synthesized
aaacaccuugagccuuaaaacgg

SEQ ID NO: 39760 - RNA, 23 nt, artificial
  Chemically synthesized
ucuuaaagcacucauaauauggc

SEQ ID NO: 39761 - RNA, 23 nt, artificial
  Chemically synthesized
aucuuaaagcacucauaauaugg

SEQ ID NO: 39762 - RNA, 23 nt, artificial
  Chemically synthesized
ccacguguggauguccaagcagc

SEQ ID NO: 39763 - RNA, 23 nt, artificial
  Chemically synthesized
gccacguguggauguccaagcag

SEQ ID NO: 39764 - RNA, 23 nt, artificial
  Chemically synthesized
ggccacguguggauguccaagca

SEQ ID NO: 39765 - RNA, 23 nt, artificial
  Chemically synthesized
agaauaaaaucuuaaagcacuca

SEQ ID NO: 39766 - RNA, 23 nt, artificial
  Chemically synthesized
uagaauaaaaucuuaaagcacuc

SEQ ID NO: 39767 - RNA, 23 nt, artificial
  Chemically synthesized
guagaauaaaaucuuaaagcacu

SEQ ID NO: 39768 - RNA, 23 nt, artificial
  Chemically synthesized
aguagaauaaaaucuuaaagcac

SEQ ID NO: 39769 - RNA, 23 nt, artificial
  Chemically synthesized
guuuggacuuuguaauuauuuuu

SEQ ID NO: 39770 - RNA, 23 nt, artificial
  Chemically synthesized
uguuuggacuuuguaauuauuuu

SEQ ID NO: 39771 - RNA, 23 nt, artificial
  Chemically synthesized
cuguuuggacuuuguaauuauuu

SEQ ID NO: 39772 - RNA, 23 nt, artificial
  Chemically synthesized
ucuucuucuuccuuaaagacauu

SEQ ID NO: 39773 - RNA, 23 nt, artificial
  Chemically synthesized
uucuucuucuuccuuaaagacau

SEQ ID NO: 39774 - RNA, 23 nt, artificial
  Chemically synthesized
gggauuuauacauauuuuuagau

SEQ ID NO: 39775 - RNA, 23 nt, artificial
  Chemically synthesized
ggggauuuauacauauuuuuaga

SEQ ID NO: 39776 - RNA, 23 nt, artificial
  Chemically synthesized
aggggauuuauacauauuuuuag

SEQ ID NO: 39777 - RNA, 23 nt, artificial
  Chemically synthesized
gaggggauuuauacauauuuuua

SEQ ID NO: 39778 - RNA, 23 nt, artificial
  Chemically synthesized
ugaggggauuuauacauauuuuu

SEQ ID NO: 39779 - RNA, 23 nt, artificial
  Chemically synthesized
uauuuugucuuuagguaaaagcu

SEQ ID NO: 39780 - RNA, 23 nt, artificial
  Chemically synthesized
auauuuugucuuuagguaaaagc

SEQ ID NO: 39781 - RNA, 23 nt, artificial
  Chemically synthesized
acuuguuucuuuuuuuguauaaa

SEQ ID NO: 39782 - RNA, 23 nt, artificial
  Chemically synthesized
aacuuguuucuuuuuuuguauaa

SEQ ID NO: 39783 - RNA, 23 nt, artificial
  Chemically synthesized
aaacuuguuucuuuuuuuguaua

SEQ ID NO: 39784 - RNA, 23 nt, artificial
  Chemically synthesized
gaaacuuguuucuuuuuuuguau

SEQ ID NO: 39785 - RNA, 23 nt, artificial
  Chemically synthesized
ggaaacuuguuucuuuuuuugua

SEQ ID NO: 39786 - RNA, 23 nt, artificial
  Chemically synthesized
caguaauuaaagaaaaaaguccu

SEQ ID NO: 39787 - RNA, 23 nt, artificial
  Chemically synthesized
caaaggagaugaaaucuguucug

SEQ ID NO: 39788 - RNA, 23 nt, artificial
  Chemically synthesized
cauuccacuugcuaaaauuauuu

SEQ ID NO: 39789 - RNA, 23 nt, artificial
  Chemically synthesized
acauuccacuugcuaaaauuauu

SEQ ID NO: 39790 - RNA, 23 nt, artificial
  Chemically synthesized
acgucaucuccaacaucgagacc

SEQ ID NO: 39791 - RNA, 23 nt, artificial
  Chemically synthesized
gacgucaucuccaacaucgagac

SEQ ID NO: 39792 - RNA, 23 nt, artificial
  Chemically synthesized
ucguguuuuguuuguuucacuug

SEQ ID NO: 39793 - RNA, 23 nt, artificial
  Chemically synthesized
uucguguuuuguuuguuucacuu

SEQ ID NO: 39794 - RNA, 23 nt, artificial
  Chemically synthesized
guucguguuuuguuuguuucacu

SEQ ID NO: 39795 - RNA, 23 nt, artificial
  Chemically synthesized
uguucguguuuuguuuguuucac

SEQ ID NO: 39796 - RNA, 23 nt, artificial
  Chemically synthesized
ucuagagaagcauuugguaagcu

SEQ ID NO: 39797 - RNA, 23 nt, artificial
  Chemically synthesized
gucuagagaagcauuugguaagc

SEQ ID NO: 39798 - RNA, 23 nt, artificial
  Chemically synthesized
ugaccuauccaagcgcauuaccc

SEQ ID NO: 39799 - RNA, 23 nt, artificial
  Chemically synthesized
augaccuauccaagcgcauuacc

SEQ ID NO: 39800 - RNA, 23 nt, artificial
  Chemically synthesized
caugaccuauccaagcgcauuac

SEQ ID NO: 39801 - RNA, 23 nt, artificial
  Chemically synthesized
acauuuaagcuaaaggcaacucg

SEQ ID NO: 39802 - RNA, 23 nt, artificial
  Chemically synthesized
gacauuuaagcuaaaggcaacuc

SEQ ID NO: 39803 - RNA, 23 nt, artificial
  Chemically synthesized
agacauuuaagcuaaaggcaacu

SEQ ID NO: 39804 - RNA, 23 nt, artificial
  Chemically synthesized
guaagcuuuaucauauauauauu

SEQ ID NO: 39805 - RNA, 23 nt, artificial
  Chemically synthesized
ucuacuccaccuucaccuacaug

SEQ ID NO: 39806 - RNA, 23 nt, artificial
  Chemically synthesized
aaacauuugcacucuuuuagugc

SEQ ID NO: 39807 - RNA, 23 nt, artificial
  Chemically synthesized
gaaacauuugcacucuuuuagug

SEQ ID NO: 39808 - RNA, 23 nt, artificial
  Chemically synthesized
uggaaacuuguuucuuuuuuugu

SEQ ID NO: 39809 - RNA, 23 nt, artificial
  Chemically synthesized
cuggaaacuuguuucuuuuuuug

SEQ ID NO: 39810 - RNA, 23 nt, artificial
  Chemically synthesized
acuggaaacuuguuucuuuuuuu

SEQ ID NO: 39811 - RNA, 23 nt, artificial
  Chemically synthesized
agauugcaaauguaguguaucac

SEQ ID NO: 39812 - RNA, 23 nt, artificial
  Chemically synthesized
agagauugcaaauguaguguauc

SEQ ID NO: 39813 - RNA, 23 nt, artificial
  Chemically synthesized
augccuuuuuguccaucccuuuu

SEQ ID NO: 39814 - RNA, 23 nt, artificial
  Chemically synthesized
aaugccuuuuuguccaucccuuu

SEQ ID NO: 39815 - RNA, 23 nt, artificial
  Chemically synthesized
aaaugccuuuuuguccaucccuu

SEQ ID NO: 39816 - RNA, 23 nt, artificial
  Chemically synthesized
aacuggaaacuuguuucuuuuuu

SEQ ID NO: 39817 - RNA, 23 nt, artificial
  Chemically synthesized
aaacuggaaacuuguuucuuuuu

SEQ ID NO: 39818 - RNA, 23 nt, artificial
  Chemically synthesized
uaaacaauagucuagagaagcau

SEQ ID NO: 39819 - RNA, 23 nt, artificial
  Chemically synthesized
aguaaacaauagucuagagaagc

SEQ ID NO: 39820 - RNA, 23 nt, artificial
  Chemically synthesized
uccauauuucucuacaucuucuc

SEQ ID NO: 39821 - RNA, 23 nt, artificial
  Chemically synthesized
auccauauuucucuacaucuucu

SEQ ID NO: 39822 - RNA, 23 nt, artificial
  Chemically synthesized
uauuuuuccaacagcuaaacuac

SEQ ID NO: 39823 - RNA, 23 nt, artificial
  Chemically synthesized
uuauuuuuccaacagcuaaacua

SEQ ID NO: 39824 - RNA, 23 nt, artificial
  Chemically synthesized
cuuauuuuuccaacagcuaaacu

SEQ ID NO: 39825 - RNA, 23 nt, artificial
  Chemically synthesized
ucuuauuuuuccaacagcuaaac

SEQ ID NO: 39826 - RNA, 23 nt, artificial
  Chemically synthesized
agagaggaccaaccagaauuccc

SEQ ID NO: 39827 - RNA, 23 nt, artificial
  Chemically synthesized
cacuugcuaaaauuauuuauuuu

SEQ ID NO: 39828 - RNA, 23 nt, artificial
  Chemically synthesized
ccacuugcuaaaauuauuuauuu

SEQ ID NO: 39829 - RNA, 23 nt, artificial
  Chemically synthesized
uccacuugcuaaaauuauuuauu

SEQ ID NO: 39830 - RNA, 23 nt, artificial
  Chemically synthesized
uuccacuugcuaaaauuauuuau

SEQ ID NO: 39831 - RNA, 23 nt, artificial
  Chemically synthesized
auuccacuugcuaaaauuauuua

SEQ ID NO: 39832 - RNA, 23 nt, artificial
  Chemically synthesized
gccucucagaacaccagcaguua

SEQ ID NO: 39833 - RNA, 23 nt, artificial
  Chemically synthesized
cuggagacuucugaacgagagcg

SEQ ID NO: 39834 - RNA, 23 nt, artificial
  Chemically synthesized
acagcucacucgaccuugaggag

SEQ ID NO: 39835 - RNA, 23 nt, artificial
  Chemically synthesized
cacagcucacucgaccuugagga

SEQ ID NO: 39836 - RNA, 23 nt, artificial
  Chemically synthesized
acacagcucacucgaccuugagg

SEQ ID NO: 39837 - RNA, 23 nt, artificial
  Chemically synthesized
cacacagcucacucgaccuugag

SEQ ID NO: 39838 - RNA, 23 nt, artificial
  Chemically synthesized
cuuuuguucucuccgugaaacuu

SEQ ID NO: 39839 - RNA, 23 nt, artificial
  Chemically synthesized
ccuuuuguucucuccgugaaacu

SEQ ID NO: 39840 - RNA, 23 nt, artificial
  Chemically synthesized
accuuuuguucucuccgugaaac

SEQ ID NO: 39841 - RNA, 23 nt, artificial
  Chemically synthesized
agcaguuaaccuucaagacauuc

SEQ ID NO: 39842 - RNA, 23 nt, artificial
  Chemically synthesized
aaagcaaguuucuuuguauuccu

SEQ ID NO: 39843 - RNA, 23 nt, artificial
  Chemically synthesized
aaaagcaaguuucuuuguauucc

SEQ ID NO: 39844 - RNA, 23 nt, artificial
  Chemically synthesized
uaaaagcaaguuucuuuguauuc

SEQ ID NO: 39845 - RNA, 23 nt, artificial
  Chemically synthesized
uuaaaagcaaguuucuuuguauu

SEQ ID NO: 39846 - RNA, 23 nt, artificial
  Chemically synthesized
auuaaaagcaaguuucuuuguau

SEQ ID NO: 39847 - RNA, 23 nt, artificial
  Chemically synthesized
guugaaaacaaacuggaaacuug

SEQ ID NO: 39848 - RNA, 23 nt, artificial
  Chemically synthesized
cagaucuuuuuaaaaagauacuu

SEQ ID NO: 39849 - RNA, 23 nt, artificial
  Chemically synthesized
ucaccugugccucucagaacacc

SEQ ID NO: 39850 - RNA, 23 nt, artificial
  Chemically synthesized
gucaccugugccucucagaacac

SEQ ID NO: 39851 - RNA, 23 nt, artificial
  Chemically synthesized
ugucaccugugccucucagaaca

SEQ ID NO: 39852 - RNA, 23 nt, artificial
  Chemically synthesized
cugucaccugugccucucagaac

SEQ ID NO: 39853 - RNA, 23 nt, artificial
  Chemically synthesized
ccuuuuuguccaucccuuuuuuc

SEQ ID NO: 39854 - RNA, 23 nt, artificial
  Chemically synthesized
agaguauuuuuguacagauuugc

SEQ ID NO: 39855 - RNA, 23 nt, artificial
  Chemically synthesized
uaaacuacucuuaguugaacagu

SEQ ID NO: 39856 - RNA, 23 nt, artificial
  Chemically synthesized
cuaaacuacucuuaguugaacag

SEQ ID NO: 39857 - RNA, 23 nt, artificial
  Chemically synthesized
agcuaaacuacucuuaguugaac

SEQ ID NO: 39858 - RNA, 23 nt, artificial
  Chemically synthesized
agaaucgugugaucagugugcua

SEQ ID NO: 39859 - RNA, 23 nt, artificial
  Chemically synthesized
gaccaaccagaauucccuuugga

SEQ ID NO: 39860 - RNA, 23 nt, artificial
  Chemically synthesized
accugugccucucagaacaccag

SEQ ID NO: 39861 - RNA, 23 nt, artificial
  Chemically synthesized
caccugugccucucagaacacca

SEQ ID NO: 39862 - RNA, 23 nt, artificial
  Chemically synthesized
uuucuuugcaggaggagaagaga

SEQ ID NO: 39863 - RNA, 23 nt, artificial
  Chemically synthesized
uuuucuuugcaggaggagaagag

SEQ ID NO: 39864 - RNA, 23 nt, artificial
  Chemically synthesized
acuuuucuuugcaggaggagaag

SEQ ID NO: 39865 - RNA, 23 nt, artificial
  Chemically synthesized
uuguccaucccuuuuuucuuugu

SEQ ID NO: 39866 - RNA, 23 nt, artificial
  Chemically synthesized
uuuguccaucccuuuuuucuuug

SEQ ID NO: 39867 - RNA, 23 nt, artificial
  Chemically synthesized
uuuuguccaucccuuuuuucuuu

SEQ ID NO: 39868 - RNA, 23 nt, artificial
  Chemically synthesized
uuuuuguccaucccuuuuuucuu

SEQ ID NO: 39869 - RNA, 23 nt, artificial
  Chemically synthesized
uggacuuuuuaaacccucuucag

SEQ ID NO: 39870 - RNA, 23 nt, artificial
  Chemically synthesized
cuggacuuuuuaaacccucuuca

SEQ ID NO: 39871 - RNA, 23 nt, artificial
  Chemically synthesized
acuggacuuuuuaaacccucuuc

SEQ ID NO: 39872 - RNA, 23 nt, artificial
  Chemically synthesized
uuuguuguuuuuguugaaaacaa

SEQ ID NO: 39873 - RNA, 23 nt, artificial
  Chemically synthesized
cucaaaggcuacgacuggacgcu

SEQ ID NO: 39874 - RNA, 23 nt, artificial
  Chemically synthesized
gcucaaaggcuacgacuggacgc

SEQ ID NO: 39875 - RNA, 23 nt, artificial
  Chemically synthesized
ugcucaaaggcuacgacuggacg

SEQ ID NO: 39876 - RNA, 23 nt, artificial
  Chemically synthesized
gugcucaaaggcuacgacuggac

SEQ ID NO: 39877 - RNA, 23 nt, artificial
  Chemically synthesized
ggugcucaaaggcuacgacugga

SEQ ID NO: 39878 - RNA, 23 nt, artificial
  Chemically synthesized
caaguuucuuuguauuccucacc

SEQ ID NO: 39879 - RNA, 23 nt, artificial
  Chemically synthesized
aagcaaguuucuuuguauuccuc

SEQ ID NO: 39880 - RNA, 23 nt, artificial
  Chemically synthesized
ugaucagugugcuaaaucucucu

SEQ ID NO: 39881 - RNA, 23 nt, artificial
  Chemically synthesized
gugaucagugugcuaaaucucuc

SEQ ID NO: 39882 - RNA, 23 nt, artificial
  Chemically synthesized
cuuugcgauuuaaggaggagcug

SEQ ID NO: 39883 - RNA, 23 nt, artificial
  Chemically synthesized
ggcuuugcgauuuaaggaggagc

SEQ ID NO: 39884 - RNA, 23 nt, artificial
  Chemically synthesized
caauaagugcccgagcacacugc

SEQ ID NO: 39885 - RNA, 23 nt, artificial
  Chemically synthesized
ccaauaagugcccgagcacacug

SEQ ID NO: 39886 - RNA, 23 nt, artificial
  Chemically synthesized
gccaauaagugcccgagcacacu

SEQ ID NO: 39887 - RNA, 23 nt, artificial
  Chemically synthesized
agccaauaagugcccgagcacac

SEQ ID NO: 39888 - RNA, 23 nt, artificial
  Chemically synthesized
cagccaauaagugcccgagcaca

SEQ ID NO: 39889 - RNA, 23 nt, artificial
  Chemically synthesized
aacuccagcuccuacuacagcca

SEQ ID NO: 39890 - RNA, 23 nt, artificial
  Chemically synthesized
gaacuccagcuccuacuacagcc

SEQ ID NO: 39891 - RNA, 23 nt, artificial
  Chemically synthesized
agaacuccagcuccuacuacagc

SEQ ID NO: 39892 - RNA, 23 nt, artificial
  Chemically synthesized
cagaacuccagcuccuacuacag

SEQ ID NO: 39893 - RNA, 23 nt, artificial
  Chemically synthesized
uuuuuuagcaguaauuaaagaaa

SEQ ID NO: 39894 - RNA, 23 nt, artificial
  Chemically synthesized
uugcaggaggagaagagaagggg

SEQ ID NO: 39895 - RNA, 23 nt, artificial
  Chemically synthesized
uuugcaggaggagaagagaaggg

SEQ ID NO: 39896 - RNA, 23 nt, artificial
  Chemically synthesized
cuuugcaggaggagaagagaagg

SEQ ID NO: 39897 - RNA, 23 nt, artificial
  Chemically synthesized
ucuuugcaggaggagaagagaag

SEQ ID NO: 39898 - RNA, 23 nt, artificial
  Chemically synthesized
cacaguacgacuacaccgaccac

SEQ ID NO: 39899 - RNA, 23 nt, artificial
  Chemically synthesized
ucacaguacgacuacaccgacca

SEQ ID NO: 39900 - RNA, 23 nt, artificial
  Chemically synthesized
cucacaguacgacuacaccgacc

SEQ ID NO: 39901 - RNA, 23 nt, artificial
  Chemically synthesized
gcucacaguacgacuacaccgac

SEQ ID NO: 39902 - RNA, 23 nt, artificial
  Chemically synthesized
gauucauuaccauuuugagggga

SEQ ID NO: 39903 - RNA, 23 nt, artificial
  Chemically synthesized
ugauucauuaccauuuugagggg

SEQ ID NO: 39904 - RNA, 23 nt, artificial
  Chemically synthesized
augauucauuaccauuuugaggg

SEQ ID NO: 39905 - RNA, 23 nt, artificial
  Chemically synthesized
uaugauucauuaccauuuugagg

SEQ ID NO: 39906 - RNA, 23 nt, artificial
  Chemically synthesized
gucuuuagguaaaagcuuugguu

SEQ ID NO: 39907 - RNA, 23 nt, artificial
  Chemically synthesized
ugucuuuagguaaaagcuuuggu

SEQ ID NO: 39908 - RNA, 23 nt, artificial
  Chemically synthesized
uugucuuuagguaaaagcuuugg

SEQ ID NO: 39909 - RNA, 23 nt, artificial
  Chemically synthesized
uuugucuuuagguaaaagcuuug

SEQ ID NO: 39910 - RNA, 23 nt, artificial
  Chemically synthesized
uuuugucuuuagguaaaagcuuu

SEQ ID NO: 39911 - RNA, 23 nt, artificial
  Chemically synthesized
gagaguuugaggauugcuuuuua

SEQ ID NO: 39912 - RNA, 23 nt, artificial
  Chemically synthesized
agagaguuugaggauugcuuuuu

SEQ ID NO: 39913 - RNA, 23 nt, artificial
  Chemically synthesized
uagagaguuugaggauugcuuuu

SEQ ID NO: 39914 - RNA, 23 nt, artificial
  Chemically synthesized
augaaaucuguucugggaauguu

SEQ ID NO: 39915 - RNA, 23 nt, artificial
  Chemically synthesized
ggagacuucugaacgagagcgag

SEQ ID NO: 39916 - RNA, 23 nt, artificial
  Chemically synthesized
guuguuaaauuauguucuuaacu

SEQ ID NO: 39917 - RNA, 23 nt, artificial
  Chemically synthesized
uguuguuaaauuauguucuuaac

SEQ ID NO: 39918 - RNA, 23 nt, artificial
  Chemically synthesized
cuguuguuaaauuauguucuuaa

SEQ ID NO: 39919 - RNA, 23 nt, artificial
  Chemically synthesized
ucuguuguuaaauuauguucuua

SEQ ID NO: 39920 - RNA, 23 nt, artificial
  Chemically synthesized
aucuguuguuaaauuauguucuu

SEQ ID NO: 39921 - RNA, 23 nt, artificial
  Chemically synthesized
uguguucguguuuuguuuguuuc

SEQ ID NO: 39922 - RNA, 23 nt, artificial
  Chemically synthesized
uauaaaugagagauugcaaaugu

SEQ ID NO: 39923 - RNA, 23 nt, artificial
  Chemically synthesized
guauaaaugagagauugcaaaug

SEQ ID NO: 39924 - RNA, 23 nt, artificial
  Chemically synthesized
uguauaaaugagagauugcaaau

SEQ ID NO: 39925 - RNA, 23 nt, artificial
  Chemically synthesized
uuguauaaaugagagauugcaaa

SEQ ID NO: 39926 - RNA, 23 nt, artificial
  Chemically synthesized
uuuguauaaaugagagauugcaa

SEQ ID NO: 39927 - RNA, 23 nt, artificial
  Chemically synthesized
auaaccgaagaaagagaggacca

SEQ ID NO: 39928 - RNA, 23 nt, artificial
  Chemically synthesized
uuuaaagaagagaaaaacaccuu

SEQ ID NO: 39929 - RNA, 23 nt, artificial
  Chemically synthesized
uuuuaaagaagagaaaaacaccu

SEQ ID NO: 39930 - RNA, 23 nt, artificial
  Chemically synthesized
uuuuuaaagaagagaaaaacacc

SEQ ID NO: 39931 - RNA, 23 nt, artificial
  Chemically synthesized
uuuuuuaaagaagagaaaaacac

SEQ ID NO: 39932 - RNA, 23 nt, artificial
  Chemically synthesized
auuuuuuaaagaagagaaaaaca

SEQ ID NO: 39933 - RNA, 23 nt, artificial
  Chemically synthesized
agcuuuccucaaaggguaugguc

SEQ ID NO: 39934 - RNA, 23 nt, artificial
  Chemically synthesized
cuucugaacgagagcgagaagcg

SEQ ID NO: 39935 - RNA, 23 nt, artificial
  Chemically synthesized
acuucugaacgagagcgagaagc

SEQ ID NO: 39936 - RNA, 23 nt, artificial
  Chemically synthesized
gacuucugaacgagagcgagaag

SEQ ID NO: 39937 - RNA, 23 nt, artificial
  Chemically synthesized
aauuauguucuuaacuguaacca

SEQ ID NO: 39938 - RNA, 23 nt, artificial
  Chemically synthesized
aaauuauguucuuaacuguaacc

SEQ ID NO: 39939 - RNA, 23 nt, artificial
  Chemically synthesized
uaaauuauguucuuaacuguaac

SEQ ID NO: 39940 - RNA, 23 nt, artificial
  Chemically synthesized
uuaaauuauguucuuaacuguaa

SEQ ID NO: 39941 - RNA, 23 nt, artificial
  Chemically synthesized
guuaaauuauguucuuaacugua

SEQ ID NO: 39942 - RNA, 23 nt, artificial
  Chemically synthesized
auagucuagagaagcauuuggua

SEQ ID NO: 39943 - RNA, 23 nt, artificial
  Chemically synthesized
acaagaaggaccacccggauuac

SEQ ID NO: 39944 - RNA, 23 nt, artificial
  Chemically synthesized
cacuuuugcucuuuuuccucccc

SEQ ID NO: 39945 - RNA, 23 nt, artificial
  Chemically synthesized
ccacuuuugcucuuuuuccuccc

SEQ ID NO: 39946 - RNA, 23 nt, artificial
  Chemically synthesized
cccacuuuugcucuuuuuccucc

SEQ ID NO: 39947 - RNA, 23 nt, artificial
  Chemically synthesized
ccccacuuuugcucuuuuuccuc

SEQ ID NO: 39948 - RNA, 23 nt, artificial
  Chemically synthesized
cccccacuuuugcucuuuuuccu

SEQ ID NO: 39949 - RNA, 23 nt, artificial
  Chemically synthesized
uuaaaaagauacuucuguaacuu

SEQ ID NO: 39950 - RNA, 23 nt, artificial
  Chemically synthesized
uuuaaaaagauacuucuguaacu

SEQ ID NO: 39951 - RNA, 23 nt, artificial
  Chemically synthesized
uuuuaaaaagauacuucuguaac

SEQ ID NO: 39952 - RNA, 23 nt, artificial
  Chemically synthesized
uuuuuaaaaagauacuucuguaa

SEQ ID NO: 39953 - RNA, 23 nt, artificial
  Chemically synthesized
cuuuuuaaaaagauacuucugua

SEQ ID NO: 39954 - RNA, 23 nt, artificial
  Chemically synthesized
augcucuuauuuuuccaacagcu

SEQ ID NO: 39955 - RNA, 23 nt, artificial
  Chemically synthesized
aaugcucuuauuuuuccaacagc

SEQ ID NO: 39956 - RNA, 23 nt, artificial
  Chemically synthesized
aaaugcucuuauuuuuccaacag

SEQ ID NO: 39957 - RNA, 23 nt, artificial
  Chemically synthesized
uaaaugcucuuauuuuuccaaca

SEQ ID NO: 39958 - RNA, 23 nt, artificial
  Chemically synthesized
gaguuugaggauugcuuuuuaaa

SEQ ID NO: 39959 - RNA, 23 nt, artificial
  Chemically synthesized
agaguuugaggauugcuuuuuaa

SEQ ID NO: 39960 - RNA, 23 nt, artificial
  Chemically synthesized
gccuuaaaacggugcugcuggga

SEQ ID NO: 39961 - RNA, 23 nt, artificial
  Chemically synthesized
agccuuaaaacggugcugcuggg

SEQ ID NO: 39962 - RNA, 23 nt, artificial
  Chemically synthesized
gagccuuaaaacggugcugcugg

SEQ ID NO: 39963 - RNA, 23 nt, artificial
  Chemically synthesized
ugagccuuaaaacggugcugcug

SEQ ID NO: 39964 - RNA, 23 nt, artificial
  Chemically synthesized
uugagccuuaaaacggugcugcu

SEQ ID NO: 39965 - RNA, 23 nt, artificial
  Chemically synthesized
agaccuucgaugucaacgaguuu

SEQ ID NO: 39966 - RNA, 23 nt, artificial
  Chemically synthesized
cgagaccuucgaugucaacgagu

SEQ ID NO: 39967 - RNA, 23 nt, artificial
  Chemically synthesized
cugggaacaacccgucuacacac

SEQ ID NO: 39968 - RNA, 23 nt, artificial
  Chemically synthesized
cacugggaacaacccgucuacac

SEQ ID NO: 39969 - RNA, 23 nt, artificial
  Chemically synthesized
gcacugggaacaacccgucuaca

SEQ ID NO: 39970 - RNA, 23 nt, artificial
  Chemically synthesized
gcauuuaaaucauauuuugucuu

SEQ ID NO: 39971 - RNA, 23 nt, artificial
  Chemically synthesized
ggcauuuaaaucauauuuugucu

SEQ ID NO: 39972 - RNA, 23 nt, artificial
  Chemically synthesized
uggcauuuaaaucauauuuuguc

SEQ ID NO: 39973 - RNA, 23 nt, artificial
  Chemically synthesized
cuggcauuuaaaucauauuuugu

SEQ ID NO: 39974 - RNA, 23 nt, artificial
  Chemically synthesized
ccuggcauuuaaaucauauuuug

SEQ ID NO: 39975 - RNA, 23 nt, artificial
  Chemically synthesized
auuauguucuuaacuguaaccag

SEQ ID NO: 39976 - RNA, 23 nt, artificial
  Chemically synthesized
gucaucuguuguuaaauuauguu

SEQ ID NO: 39977 - RNA, 23 nt, artificial
  Chemically synthesized
uauccaagcgcauuacccacuug

SEQ ID NO: 39978 - RNA, 23 nt, artificial
  Chemically synthesized
cuauccaagcgcauuacccacuu

SEQ ID NO: 39979 - RNA, 23 nt, artificial
  Chemically synthesized
ccuauccaagcgcauuacccacu

SEQ ID NO: 39980 - RNA, 23 nt, artificial
  Chemically synthesized
accuauccaagcgcauuacccac

SEQ ID NO: 39981 - RNA, 23 nt, artificial
  Chemically synthesized
aacuuugcuuaauuccucaggcu

SEQ ID NO: 39982 - RNA, 23 nt, artificial
  Chemically synthesized
uaacuuugcuuaauuccucaggc

SEQ ID NO: 39983 - RNA, 23 nt, artificial
  Chemically synthesized
uuaacuuugcuuaauuccucagg

SEQ ID NO: 39984 - RNA, 23 nt, artificial
  Chemically synthesized
guuaacuuugcuuaauuccucag

SEQ ID NO: 39985 - RNA, 23 nt, artificial
  Chemically synthesized
uagagaagcauuugguaagcuuu

SEQ ID NO: 39986 - RNA, 23 nt, artificial
  Chemically synthesized
aaacaaacuggaaacuuguuucu

SEQ ID NO: 39987 - RNA, 23 nt, artificial
  Chemically synthesized
aaaacaaacuggaaacuuguuuc

SEQ ID NO: 39988 - RNA, 23 nt, artificial
  Chemically synthesized
gaaaacaaacuggaaacuuguuu

SEQ ID NO: 39989 - RNA, 23 nt, artificial
  Chemically synthesized
ugugccucucagaacaccagcag

SEQ ID NO: 39990 - RNA, 23 nt, artificial
  Chemically synthesized
cugugccucucagaacaccagca

SEQ ID NO: 39991 - RNA, 23 nt, artificial
  Chemically synthesized
ccugugccucucagaacaccagc

SEQ ID NO: 39992 - RNA, 23 nt, artificial
  Chemically synthesized
cgucaacggcuccagcaagaaca

SEQ ID NO: 39993 - RNA, 23 nt, artificial
  Chemically synthesized
gcgucaacggcuccagcaagaac

SEQ ID NO: 39994 - RNA, 23 nt, artificial
  Chemically synthesized
cgcgucaacggcuccagcaagaa

SEQ ID NO: 39995 - RNA, 23 nt, artificial
  Chemically synthesized
ggacuuuguaauuauuuuuuuag

SEQ ID NO: 39996 - RNA, 23 nt, artificial
  Chemically synthesized
uggacuuuguaauuauuuuuuua

SEQ ID NO: 39997 - RNA, 23 nt, artificial
  Chemically synthesized
uuggacuuuguaauuauuuuuuu

SEQ ID NO: 39998 - RNA, 23 nt, artificial
  Chemically synthesized
uuuggacuuuguaauuauuuuuu

SEQ ID NO: 39999 - RNA, 23 nt, artificial
  Chemically synthesized
cacaaaaacaaugcaagcaugug

SEQ ID NO: 40000 - RNA, 23 nt, artificial
  Chemically synthesized
acacaaaaacaaugcaagcaugu

SEQ ID NO: 40001 - RNA, 23 nt, artificial
  Chemically synthesized
gacacaaaaacaaugcaagcaug

SEQ ID NO: 40002 - RNA, 23 nt, artificial
  Chemically synthesized
caaauguaguguaucacugaguc

SEQ ID NO: 40003 - RNA, 23 nt, artificial
  Chemically synthesized
augugucauccauauuucucuac

SEQ ID NO: 40004 - RNA, 23 nt, artificial
  Chemically synthesized
ccaugaacgccuucauggugugg

SEQ ID NO: 40005 - RNA, 23 nt, artificial
  Chemically synthesized
cccaugaacgccuucauggugug

SEQ ID NO: 40006 - RNA, 23 nt, artificial
  Chemically synthesized
gcccaugaacgccuucauggugu

SEQ ID NO: 40007 - RNA, 23 nt, artificial
  Chemically synthesized
ggcccaugaacgccuucauggug

SEQ ID NO: 40008 - RNA, 23 nt, artificial
  Chemically synthesized
cggcccaugaacgccuucauggu

SEQ ID NO: 40009 - RNA, 23 nt, artificial
  Chemically synthesized
ccacccggauuacaaguaccagc

SEQ ID NO: 40010 - RNA, 23 nt, artificial
  Chemically synthesized
accacccggauuacaaguaccag

SEQ ID NO: 40011 - RNA, 23 nt, artificial
  Chemically synthesized
ggaccacccggauuacaaguacc

SEQ ID NO: 40012 - RNA, 23 nt, artificial
  Chemically synthesized
acagauuugcuuucucuuacaaa

SEQ ID NO: 40013 - RNA, 23 nt, artificial
  Chemically synthesized
uacagauuugcuuucucuuacaa

SEQ ID NO: 40014 - RNA, 23 nt, artificial
  Chemically synthesized
guacagauuugcuuucucuuaca

SEQ ID NO: 40015 - RNA, 23 nt, artificial
  Chemically synthesized
uguacagauuugcuuucucuuac

SEQ ID NO: 40016 - RNA, 23 nt, artificial
  Chemically synthesized
cccuuuuuucuuuguuguuuuug

SEQ ID NO: 40017 - RNA, 23 nt, artificial
  Chemically synthesized
ucccuuuuuucuuuguuguuuuu

SEQ ID NO: 40018 - RNA, 23 nt, artificial
  Chemically synthesized
aucccuuuuuucuuuguuguuuu

SEQ ID NO: 40019 - RNA, 23 nt, artificial
  Chemically synthesized
caucccuuuuuucuuuguuguuu

SEQ ID NO: 40020 - RNA, 23 nt, artificial
  Chemically synthesized
ccaucccuuuuuucuuuguuguu

SEQ ID NO: 40021 - RNA, 23 nt, artificial
  Chemically synthesized
auaaaggccuuauuuugcaauua

SEQ ID NO: 40022 - RNA, 23 nt, artificial
  Chemically synthesized
uguauaaaagcagaucuuuuuaa

SEQ ID NO: 40023 - RNA, 23 nt, artificial
  Chemically synthesized
cuguauaaaagcagaucuuuuua

SEQ ID NO: 40024 - RNA, 23 nt, artificial
  Chemically synthesized
ucuguauaaaagcagaucuuuuu

SEQ ID NO: 40025 - RNA, 23 nt, artificial
  Chemically synthesized
uucuguauaaaagcagaucuuuu

SEQ ID NO: 40026 - RNA, 23 nt, artificial
  Chemically synthesized
ugaacagugugcccuagcuuuuc

SEQ ID NO: 40027 - RNA, 23 nt, artificial
  Chemically synthesized
aauuaugggaguaaacaauaguc

SEQ ID NO: 40028 - RNA, 23 nt, artificial
  Chemically synthesized
guaguguaucacugagucauuug

SEQ ID NO: 40029 - RNA, 23 nt, artificial
  Chemically synthesized
uguaguguaucacugagucauuu

SEQ ID NO: 40030 - RNA, 23 nt, artificial
  Chemically synthesized
auguaguguaucacugagucauu

SEQ ID NO: 40031 - RNA, 23 nt, artificial
  Chemically synthesized
auuuugucuuuagguaaaagcuu

SEQ ID NO: 40032 - RNA, 23 nt, artificial
  Chemically synthesized
gcucuuauuuuuccaacagcuaa

SEQ ID NO: 40033 - RNA, 23 nt, artificial
  Chemically synthesized
ucguacccaaauuuccaagacac

SEQ ID NO: 40034 - RNA, 23 nt, artificial
  Chemically synthesized
uaaaaagauacuucuguaacuua

SEQ ID NO: 40035 - RNA, 23 nt, artificial
  Chemically synthesized
acccggauuacaaguaccagccg

SEQ ID NO: 40036 - RNA, 23 nt, artificial
  Chemically synthesized
cacccggauuacaaguaccagcc

SEQ ID NO: 40037 - RNA, 23 nt, artificial
  Chemically synthesized
ccuucgaugucaacgaguuugac

SEQ ID NO: 40038 - RNA, 23 nt, artificial
  Chemically synthesized
gaccuucgaugucaacgaguuug

SEQ ID NO: 40039 - RNA, 23 nt, artificial
  Chemically synthesized
uucugaacgagagcgagaagcgg

SEQ ID NO: 40040 - RNA, 23 nt, artificial
  Chemically synthesized
gccuuaaaaaaaaauaaaggccu

SEQ ID NO: 40041 - RNA, 23 nt, artificial
  Chemically synthesized
ugccuuaaaaaaaaauaaaggcc

SEQ ID NO: 40042 - RNA, 23 nt, artificial
  Chemically synthesized
cuuguuucuuuuuuuguauaaau

SEQ ID NO: 40043 - RNA, 23 nt, artificial
  Chemically synthesized
aaucaacgagaaacuggacuuuu

SEQ ID NO: 40044 - RNA, 23 nt, artificial
  Chemically synthesized
uguauuccucacccuagauuugu

SEQ ID NO: 40045 - RNA, 23 nt, artificial
  Chemically synthesized
accagaacuccagcuccuacuac

SEQ ID NO: 40046 - RNA, 23 nt, artificial
  Chemically synthesized
ccaccagaacuccagcuccuacu

SEQ ID NO: 40047 - RNA, 23 nt, artificial
  Chemically synthesized
accaccagaacuccagcuccuac

SEQ ID NO: 40048 - RNA, 23 nt, artificial
  Chemically synthesized
gaccaccagaacuccagcuccua

SEQ ID NO: 40049 - RNA, 23 nt, artificial
  Chemically synthesized
augauggagaaucgugugaucag

SEQ ID NO: 40050 - RNA, 23 nt, artificial
  Chemically synthesized
gaugauggagaaucgugugauca

SEQ ID NO: 40051 - RNA, 23 nt, artificial
  Chemically synthesized
ugcuuaauuccucaggcuuugcg

SEQ ID NO: 40052 - RNA, 23 nt, artificial
  Chemically synthesized
uugcuuaauuccucaggcuuugc

SEQ ID NO: 40053 - RNA, 23 nt, artificial
  Chemically synthesized
uuugcuuaauuccucaggcuuug

SEQ ID NO: 40054 - RNA, 23 nt, artificial
  Chemically synthesized
acaaacuggaaacuuguuucuuu

SEQ ID NO: 40055 - RNA, 23 nt, artificial
  Chemically synthesized
uguuaaauuauguucuuaacugu

SEQ ID NO: 40056 - RNA, 23 nt, artificial
  Chemically synthesized
gaggaagucggugaagaacgggc

SEQ ID NO: 40057 - RNA, 23 nt, artificial
  Chemically synthesized
uuucuguauaaaagcagaucuuu

SEQ ID NO: 40058 - RNA, 23 nt, artificial
  Chemically synthesized
auuucuguauaaaagcagaucuu

SEQ ID NO: 40059 - RNA, 23 nt, artificial
  Chemically synthesized
cccgaucugaagaaggagagcga

SEQ ID NO: 40060 - RNA, 23 nt, artificial
  Chemically synthesized
gcccgaucugaagaaggagagcg

SEQ ID NO: 40061 - RNA, 23 nt, artificial
  Chemically synthesized
guccucugugaggaauauucucu

SEQ ID NO: 40062 - RNA, 23 nt, artificial
  Chemically synthesized
aguccucugugaggaauauucuc

SEQ ID NO: 40063 - RNA, 23 nt, artificial
  Chemically synthesized
aaguccucugugaggaauauucu

SEQ ID NO: 40064 - RNA, 23 nt, artificial
  Chemically synthesized
cuucgaugucaacgaguuugacc

SEQ ID NO: 40065 - RNA, 23 nt, artificial
  Chemically synthesized
ccgugaaacuuaccuuucccuuu

SEQ ID NO: 40066 - RNA, 23 nt, artificial
  Chemically synthesized
uccgugaaacuuaccuuucccuu

SEQ ID NO: 40067 - RNA, 23 nt, artificial
  Chemically synthesized
cuccgugaaacuuaccuuucccu

SEQ ID NO: 40068 - RNA, 23 nt, artificial
  Chemically synthesized
aaaguccucugugaggaauauuc

SEQ ID NO: 40069 - RNA, 23 nt, artificial
  Chemically synthesized
ccaagcgcauuacccacuugugg

SEQ ID NO: 40070 - RNA, 23 nt, artificial
  Chemically synthesized
uccaagcgcauuacccacuugug

SEQ ID NO: 40071 - RNA, 23 nt, artificial
  Chemically synthesized
auccaagcgcauuacccacuugu

SEQ ID NO: 40072 - RNA, 23 nt, artificial
  Chemically synthesized
ucaaaggguauggucaucuguug

SEQ ID NO: 40073 - RNA, 23 nt, artificial
  Chemically synthesized
aaaggagaugaaaucuguucugg

SEQ ID NO: 40074 - RNA, 23 nt, artificial
  Chemically synthesized
acaauagucuagagaagcauuug

SEQ ID NO: 40075 - RNA, 23 nt, artificial
  Chemically synthesized
guccaucccuuuuuucuuuguug

SEQ ID NO: 40076 - RNA, 23 nt, artificial
  Chemically synthesized
aagagaaaaacaccuugagccuu

SEQ ID NO: 40077 - RNA, 23 nt, artificial
  Chemically synthesized
cgugaaacuuaccuuucccuuuu

SEQ ID NO: 40078 - RNA, 23 nt, artificial
  Chemically synthesized
agauaaaauuaaaugcucuuauu

SEQ ID NO: 40079 - RNA, 23 nt, artificial
  Chemically synthesized
uagauaaaauuaaaugcucuuau

SEQ ID NO: 40080 - RNA, 23 nt, artificial
  Chemically synthesized
uuagauaaaauuaaaugcucuua

SEQ ID NO: 40081 - RNA, 23 nt, artificial
  Chemically synthesized
uuuagauaaaauuaaaugcucuu

SEQ ID NO: 40082 - RNA, 23 nt, artificial
  Chemically synthesized
uuuuagauaaaauuaaaugcucu

SEQ ID NO: 40083 - RNA, 23 nt, artificial
  Chemically synthesized
cacaaacaugaccuauccaagcg

SEQ ID NO: 40084 - RNA, 23 nt, artificial
  Chemically synthesized
acacaaacaugaccuauccaagc

SEQ ID NO: 40085 - RNA, 23 nt, artificial
  Chemically synthesized
gacacaaacaugaccuauccaag

SEQ ID NO: 40086 - RNA, 23 nt, artificial
  Chemically synthesized
aagacacaaacaugaccuaucca

SEQ ID NO: 40087 - RNA, 23 nt, artificial
  Chemically synthesized
uucuucuuccuuaaagacauuua

SEQ ID NO: 40088 - RNA, 23 nt, artificial
  Chemically synthesized
cuucuucuuccuuaaagacauuu

SEQ ID NO: 40089 - RNA, 23 nt, artificial
  Chemically synthesized
ugcagcacaagaaggaccacccg

SEQ ID NO: 40090 - RNA, 23 nt, artificial
  Chemically synthesized
gugcagcacaagaaggaccaccc

SEQ ID NO: 40091 - RNA, 23 nt, artificial
  Chemically synthesized
cgugcagcacaagaaggaccacc

SEQ ID NO: 40092 - RNA, 23 nt, artificial
  Chemically synthesized
gcgugcagcacaagaaggaccac

SEQ ID NO: 40093 - RNA, 23 nt, artificial
  Chemically synthesized
cgcgugcagcacaagaaggacca

SEQ ID NO: 40094 - RNA, 23 nt, artificial
  Chemically synthesized
uaguguaucacugagucauuugc

SEQ ID NO: 40095 - RNA, 23 nt, artificial
  Chemically synthesized
ucgaugucaacgaguuugaccag

SEQ ID NO: 40096 - RNA, 23 nt, artificial
  Chemically synthesized
uucgaugucaacgaguuugacca

SEQ ID NO: 40097 - RNA, 23 nt, artificial
  Chemically synthesized
guaaaaggcaagcaaaggagaug

SEQ ID NO: 40098 - RNA, 23 nt, artificial
  Chemically synthesized
ugccucucagaacaccagcaguu

SEQ ID NO: 40099 - RNA, 23 nt, artificial
  Chemically synthesized
gugccucucagaacaccagcagu

SEQ ID NO: 40100 - RNA, 23 nt, artificial
  Chemically synthesized
cuucaaccucccacacuacagcc

SEQ ID NO: 40101 - RNA, 23 nt, artificial
  Chemically synthesized
ucagugugcuaaaucucucugcc

SEQ ID NO: 40102 - RNA, 23 nt, artificial
  Chemically synthesized
aucagugugcuaaaucucucugc

SEQ ID NO: 40103 - RNA, 23 nt, artificial
  Chemically synthesized
gaucagugugcuaaaucucucug

SEQ ID NO: 40104 - RNA, 23 nt, artificial
  Chemically synthesized
gauaaaauuaaaugcucuuauuu

SEQ ID NO: 40105 - RNA, 23 nt, artificial
  Chemically synthesized
uuguucucuccgugaaacuuacc

SEQ ID NO: 40106 - RNA, 23 nt, artificial
  Chemically synthesized
uuuguucucuccgugaaacuuac

SEQ ID NO: 40107 - RNA, 23 nt, artificial
  Chemically synthesized
cuuuuuucuuuguuguuuuuguu

SEQ ID NO: 40108 - RNA, 23 nt, artificial
  Chemically synthesized
ccuuuuuucuuuguuguuuuugu

SEQ ID NO: 40109 - RNA, 23 nt, artificial
  Chemically synthesized
aacugacuggaaacuucaguggc

SEQ ID NO: 40110 - RNA, 23 nt, artificial
  Chemically synthesized
accuggcauuuaaaucauauuuu

SEQ ID NO: 40111 - RNA, 23 nt, artificial
  Chemically synthesized
gagucauuugcaguguuuucugc

SEQ ID NO: 40112 - RNA, 23 nt, artificial
  Chemically synthesized
ugagucauuugcaguguuuucug

SEQ ID NO: 40113 - RNA, 23 nt, artificial
  Chemically synthesized
cugagucauuugcaguguuuucu

SEQ ID NO: 40114 - RNA, 23 nt, artificial
  Chemically synthesized
acugagucauuugcaguguuuuc

SEQ ID NO: 40115 - RNA, 23 nt, artificial
  Chemically synthesized
uuagguaaaagcuuugguuugug

SEQ ID NO: 40116 - RNA, 23 nt, artificial
  Chemically synthesized
uuuagguaaaagcuuugguuugu

SEQ ID NO: 40117 - RNA, 23 nt, artificial
  Chemically synthesized
aaauaaccgaagaaagagaggac

SEQ ID NO: 40118 - RNA, 23 nt, artificial
  Chemically synthesized
aaaaaauaaaggccuuauuuugc

SEQ ID NO: 40119 - RNA, 23 nt, artificial
  Chemically synthesized
aaaaaaauaaaggccuuauuuug

SEQ ID NO: 40120 - RNA, 23 nt, artificial
  Chemically synthesized
aaaaaaaauaaaggccuuauuuu

SEQ ID NO: 40121 - RNA, 23 nt, artificial
  Chemically synthesized
aaaaaaaaauaaaggccuuauuu

SEQ ID NO: 40122 - RNA, 23 nt, artificial
  Chemically synthesized
uaaaaaaaaauaaaggccuuauu

SEQ ID NO: 40123 - RNA, 23 nt, artificial
  Chemically synthesized
aucugaagaaggagagcgaggag

SEQ ID NO: 40124 - RNA, 23 nt, artificial
  Chemically synthesized
cgaucugaagaaggagagcgagg

SEQ ID NO: 40125 - RNA, 23 nt, artificial
  Chemically synthesized
ccgaucugaagaaggagagcgag

SEQ ID NO: 40126 - RNA, 23 nt, artificial
  Chemically synthesized
uuccuuaaagacauuuaagcuaa

SEQ ID NO: 40127 - RNA, 23 nt, artificial
  Chemically synthesized
uuuuuuuagcaguaauuaaagaa

SEQ ID NO: 40128 - RNA, 23 nt, artificial
  Chemically synthesized
auuuuuuuagcaguaauuaaaga

SEQ ID NO: 40129 - RNA, 23 nt, artificial
  Chemically synthesized
acaaacaugaccuauccaagcgc

SEQ ID NO: 40130 - RNA, 23 nt, artificial
  Chemically synthesized
auugcaaauguaguguaucacug

SEQ ID NO: 40131 - RNA, 23 nt, artificial
  Chemically synthesized
uauuaaaagcaaguuucuuugua

SEQ ID NO: 40132 - RNA, 23 nt, artificial
  Chemically synthesized
uuaaaugcucuuauuuuuccaac

SEQ ID NO: 40133 - RNA, 23 nt, artificial
  Chemically synthesized
auuaaaugcucuuauuuuuccaa

SEQ ID NO: 40134 - RNA, 23 nt, artificial
  Chemically synthesized
aauuaaaugcucuuauuuuucca

SEQ ID NO: 40135 - RNA, 23 nt, artificial
  Chemically synthesized
aaacuggacuuuuuaaacccucu

SEQ ID NO: 40136 - RNA, 23 nt, artificial
  Chemically synthesized
cgucaucuccaacaucgagaccu

SEQ ID NO: 40137 - RNA, 23 nt, artificial
  Chemically synthesized
ucaucuguuguuaaauuauguuc

SEQ ID NO: 40138 - RNA, 23 nt, artificial
  Chemically synthesized
aauaaaggccuuauuuugcaauu

SEQ ID NO: 40139 - RNA, 23 nt, artificial
  Chemically synthesized
aaauaaaggccuuauuuugcaau

SEQ ID NO: 40140 - RNA, 23 nt, artificial
  Chemically synthesized
aaaauaaaggccuuauuuugcaa

SEQ ID NO: 40141 - RNA, 23 nt, artificial
  Chemically synthesized
uuuuguauaaaugagagauugca

SEQ ID NO: 40142 - RNA, 23 nt, artificial
  Chemically synthesized
uauuuauuuuguaaggagagguu

SEQ ID NO: 40143 - RNA, 23 nt, artificial
  Chemically synthesized
uuauuuauuuuguaaggagaggu

SEQ ID NO: 40144 - RNA, 23 nt, artificial
  Chemically synthesized
auuauuuauuuuguaaggagagg

SEQ ID NO: 40145 - RNA, 23 nt, artificial
  Chemically synthesized
aauuauuuauuuuguaaggagag

SEQ ID NO: 40146 - RNA, 23 nt, artificial
  Chemically synthesized
aaauuauuuauuuuguaaggaga

SEQ ID NO: 40147 - RNA, 23 nt, artificial
  Chemically synthesized
aguuaaccuucaagacauuccac

SEQ ID NO: 40148 - RNA, 23 nt, artificial
  Chemically synthesized
aacuacucuuaguugaacagugu

SEQ ID NO: 40149 - RNA, 23 nt, artificial
  Chemically synthesized
aaacuacucuuaguugaacagug

SEQ ID NO: 40150 - RNA, 23 nt, artificial
  Chemically synthesized
gggcaagcucuggagacuucuga

SEQ ID NO: 40151 - RNA, 23 nt, artificial
  Chemically synthesized
cugcugggaaacauuugcacucu

SEQ ID NO: 40152 - RNA, 23 nt, artificial
  Chemically synthesized
gcugcugggaaacauuugcacuc

SEQ ID NO: 40153 - RNA, 23 nt, artificial
  Chemically synthesized
ugcugcugggaaacauuugcacu

SEQ ID NO: 40154 - RNA, 23 nt, artificial
  Chemically synthesized
gugcugcugggaaacauuugcac

SEQ ID NO: 40155 - RNA, 23 nt, artificial
  Chemically synthesized
auuaugggaguaaacaauagucu

SEQ ID NO: 40156 - RNA, 23 nt, artificial
  Chemically synthesized
uucugggaauguuucagcagcca

SEQ ID NO: 40157 - RNA, 23 nt, artificial
  Chemically synthesized
guucugggaauguuucagcagcc

SEQ ID NO: 40158 - RNA, 23 nt, artificial
  Chemically synthesized
uguucugggaauguuucagcagc

SEQ ID NO: 40159 - RNA, 23 nt, artificial
  Chemically synthesized
ucacugagucauuugcaguguuu

SEQ ID NO: 40160 - RNA, 23 nt, artificial
  Chemically synthesized
aucacugagucauuugcaguguu

SEQ ID NO: 40161 - RNA, 23 nt, artificial
  Chemically synthesized
ugcuaaaucucucugccuguuug

SEQ ID NO: 40162 - RNA, 23 nt, artificial
  Chemically synthesized
ugugcuaaaucucucugccuguu

SEQ ID NO: 40163 - RNA, 23 nt, artificial
  Chemically synthesized
cagaacaccagcaguuaaccuuc

SEQ ID NO: 40164 - RNA, 23 nt, artificial
  Chemically synthesized
acuccagcuccuacuacagccac

SEQ ID NO: 40165 - RNA, 23 nt, artificial
  Chemically synthesized
gcguaugaaucuccuggaccccu

SEQ ID NO: 40166 - RNA, 23 nt, artificial
  Chemically synthesized
caucuguuguuaaauuauguucu

SEQ ID NO: 40167 - RNA, 23 nt, artificial
  Chemically synthesized
caucuccaacaucgagaccuucg

SEQ ID NO: 40168 - RNA, 23 nt, artificial
  Chemically synthesized
ucaucuccaacaucgagaccuuc

SEQ ID NO: 40169 - RNA, 23 nt, artificial
  Chemically synthesized
gucaucuccaacaucgagaccuu

SEQ ID NO: 40170 - RNA, 23 nt, artificial
  Chemically synthesized
cccggauuacaaguaccagccgc

SEQ ID NO: 40171 - RNA, 23 nt, artificial
  Chemically synthesized
cccguucuucaccgacuuccucc

SEQ ID NO: 40172 - RNA, 23 nt, artificial
  Chemically synthesized
ccguucuucaccgacuuccuccg

SEQ ID NO: 40173 - RNA, 23 nt, artificial
  Chemically synthesized
cguucuucaccgacuuccuccgc

SEQ ID NO: 40174 - RNA, 23 nt, artificial
  Chemically synthesized
guucuucaccgacuuccuccgcc

SEQ ID NO: 40175 - RNA, 23 nt, artificial
  Chemically synthesized
uucuucaccgacuuccuccgccg

SEQ ID NO: 40176 - RNA, 23 nt, artificial
  Chemically synthesized
cgauucuccaucauccuccacgc

SEQ ID NO: 40177 - RNA, 23 nt, artificial
  Chemically synthesized
gauucuccaucauccuccacgcu

SEQ ID NO: 40178 - RNA, 23 nt, artificial
  Chemically synthesized
gguuuaaaaaguccaguuucucg

SEQ ID NO: 40179 - RNA, 23 nt, artificial
  Chemically synthesized
guuuaaaaaguccaguuucucgu

SEQ ID NO: 40180 - RNA, 23 nt, artificial
  Chemically synthesized
uuuguuuuaauuaaaaccucucc

SEQ ID NO: 40181 - RNA, 23 nt, artificial
  Chemically synthesized
uuguuuuaauuaaaaccucuccu

SEQ ID NO: 40182 - RNA, 23 nt, artificial
  Chemically synthesized
uguuuuaauuaaaaccucuccuu

SEQ ID NO: 40183 - RNA, 23 nt, artificial
  Chemically synthesized
guuuuaauuaaaaccucuccuua

SEQ ID NO: 40184 - RNA, 23 nt, artificial
  Chemically synthesized
uuuuaauuaaaaccucuccuuac

SEQ ID NO: 40185 - RNA, 23 nt, artificial
  Chemically synthesized
aaguuuccagucaguuucgagcu

SEQ ID NO: 40186 - RNA, 23 nt, artificial
  Chemically synthesized
aguuuccagucaguuucgagcuc

SEQ ID NO: 40187 - RNA, 23 nt, artificial
  Chemically synthesized
uuuaauuaaaaccucuccuuaca

SEQ ID NO: 40188 - RNA, 23 nt, artificial
  Chemically synthesized
ggguuuaaaaaguccaguuucuc

SEQ ID NO: 40189 - RNA, 23 nt, artificial
  Chemically synthesized
auauuuaaaauagagaauauucc

SEQ ID NO: 40190 - RNA, 23 nt, artificial
  Chemically synthesized
uauuuaaaauagagaauauuccu

SEQ ID NO: 40191 - RNA, 23 nt, artificial
  Chemically synthesized
auuuaaaauagagaauauuccuc

SEQ ID NO: 40192 - RNA, 23 nt, artificial
  Chemically synthesized
uuuaaaauagagaauauuccuca

SEQ ID NO: 40193 - RNA, 23 nt, artificial
  Chemically synthesized
uuaaaauagagaauauuccucac

SEQ ID NO: 40194 - RNA, 23 nt, artificial
  Chemically synthesized
gacuuuuuucuuuaauuacugcu

SEQ ID NO: 40195 - RNA, 23 nt, artificial
  Chemically synthesized
acuuuuuucuuuaauuacugcua

SEQ ID NO: 40196 - RNA, 23 nt, artificial
  Chemically synthesized
cuuuuuucuuuaauuacugcuaa

SEQ ID NO: 40197 - RNA, 23 nt, artificial
  Chemically synthesized
uuuuuucuuuaauuacugcuaaa

SEQ ID NO: 40198 - RNA, 23 nt, artificial
  Chemically synthesized
uuuuucuuuaauuacugcuaaaa

SEQ ID NO: 40199 - RNA, 23 nt, artificial
  Chemically synthesized
gagauuuagcacacugaucacac

SEQ ID NO: 40200 - RNA, 23 nt, artificial
  Chemically synthesized
gauuuagcacacugaucacacga

SEQ ID NO: 40201 - RNA, 23 nt, artificial
  Chemically synthesized
auuuagcacacugaucacacgau

SEQ ID NO: 40202 - RNA, 23 nt, artificial
  Chemically synthesized
aagauuuuauucuacugacuucu

SEQ ID NO: 40203 - RNA, 23 nt, artificial
  Chemically synthesized
agauuuuauucuacugacuucua

SEQ ID NO: 40204 - RNA, 23 nt, artificial
  Chemically synthesized
gauuuuauucuacugacuucuaa

SEQ ID NO: 40205 - RNA, 23 nt, artificial
  Chemically synthesized
auuuuauucuacugacuucuaaa

SEQ ID NO: 40206 - RNA, 23 nt, artificial
  Chemically synthesized
uuuuauucuacugacuucuaaaa

SEQ ID NO: 40207 - RNA, 23 nt, artificial
  Chemically synthesized
gggguucauguaggugaaggugg

SEQ ID NO: 40208 - RNA, 23 nt, artificial
  Chemically synthesized
ggguucauguaggugaaggugga

SEQ ID NO: 40209 - RNA, 23 nt, artificial
  Chemically synthesized
gguucauguaggugaagguggag

SEQ ID NO: 40210 - RNA, 23 nt, artificial
  Chemically synthesized
guucauguaggugaagguggagu

SEQ ID NO: 40211 - RNA, 23 nt, artificial
  Chemically synthesized
uucauguaggugaagguggagua

SEQ ID NO: 40212 - RNA, 23 nt, artificial
  Chemically synthesized
uuuauuuuuuuuuaaggcagcuc

SEQ ID NO: 40213 - RNA, 23 nt, artificial
  Chemically synthesized
ccaguuucucguugauuucgcug

SEQ ID NO: 40214 - RNA, 23 nt, artificial
  Chemically synthesized
caguuucucguugauuucgcugc

SEQ ID NO: 40215 - RNA, 23 nt, artificial
  Chemically synthesized
uccgucuugaugugcguucgcug

SEQ ID NO: 40216 - RNA, 23 nt, artificial
  Chemically synthesized
ccgucuugaugugcguucgcugg

SEQ ID NO: 40217 - RNA, 23 nt, artificial
  Chemically synthesized
cgucuugaugugcguucgcuggg

SEQ ID NO: 40218 - RNA, 23 nt, artificial
  Chemically synthesized
gucuugaugugcguucgcuggga

SEQ ID NO: 40219 - RNA, 23 nt, artificial
  Chemically synthesized
ucuugaugugcguucgcugggac

SEQ ID NO: 40220 - RNA, 23 nt, artificial
  Chemically synthesized
cucuagacuauuguuuacuccca

SEQ ID NO: 40221 - RNA, 23 nt, artificial
  Chemically synthesized
cuagacuauuguuuacucccaua

SEQ ID NO: 40222 - RNA, 23 nt, artificial
  Chemically synthesized
uagacuauuguuuacucccauaa

SEQ ID NO: 40223 - RNA, 23 nt, artificial
  Chemically synthesized
ccuuugcuugccuuuuaccucuu

SEQ ID NO: 40224 - RNA, 23 nt, artificial
  Chemically synthesized
cuuugcuugccuuuuaccucuuu

SEQ ID NO: 40225 - RNA, 23 nt, artificial
  Chemically synthesized
cugcuuuuauacagaaauugaag

SEQ ID NO: 40226 - RNA, 23 nt, artificial
  Chemically synthesized
gcuuuuauacagaaauugaagga

SEQ ID NO: 40227 - RNA, 23 nt, artificial
  Chemically synthesized
cuuuuauacagaaauugaaggau

SEQ ID NO: 40228 - RNA, 23 nt, artificial
  Chemically synthesized
uuuuauacagaaauugaaggaug

SEQ ID NO: 40229 - RNA, 23 nt, artificial
  Chemically synthesized
ggcauuuauacaaaucuagggug

SEQ ID NO: 40230 - RNA, 23 nt, artificial
  Chemically synthesized
gcauuuauacaaaucuaggguga

SEQ ID NO: 40231 - RNA, 23 nt, artificial
  Chemically synthesized
cauuuauacaaaucuagggugag

SEQ ID NO: 40232 - RNA, 23 nt, artificial
  Chemically synthesized
gcuguagugugggagguugaagg

SEQ ID NO: 40233 - RNA, 23 nt, artificial
  Chemically synthesized
cuguagugugggagguugaaggg

SEQ ID NO: 40234 - RNA, 23 nt, artificial
  Chemically synthesized
uguagugugggagguugaagggg

SEQ ID NO: 40235 - RNA, 23 nt, artificial
  Chemically synthesized
guagugugggagguugaaggggc

SEQ ID NO: 40236 - RNA, 23 nt, artificial
  Chemically synthesized
uagugugggagguugaaggggcu

SEQ ID NO: 40237 - RNA, 23 nt, artificial
  Chemically synthesized
gccuuuauuuuuuuuuaaggcag

SEQ ID NO: 40238 - RNA, 23 nt, artificial
  Chemically synthesized
ccuuuauuuuuuuuuaaggcagc

SEQ ID NO: 40239 - RNA, 23 nt, artificial
  Chemically synthesized
cuuuauuuuuuuuuaaggcagcu

SEQ ID NO: 40240 - RNA, 23 nt, artificial
  Chemically synthesized
agcuuaaaugucuuuaaggaaga

SEQ ID NO: 40241 - RNA, 23 nt, artificial
  Chemically synthesized
gcuuaaaugucuuuaaggaagaa

SEQ ID NO: 40242 - RNA, 23 nt, artificial
  Chemically synthesized
cuuaaaugucuuuaaggaagaag

SEQ ID NO: 40243 - RNA, 23 nt, artificial
  Chemically synthesized
uuaaaugucuuuaaggaagaaga

SEQ ID NO: 40244 - RNA, 23 nt, artificial
  Chemically synthesized
uauauauaugauaaagcuuacca

SEQ ID NO: 40245 - RNA, 23 nt, artificial
  Chemically synthesized
auauauaugauaaagcuuaccaa

SEQ ID NO: 40246 - RNA, 23 nt, artificial
  Chemically synthesized
uauauaugauaaagcuuaccaaa

SEQ ID NO: 40247 - RNA, 23 nt, artificial
  Chemically synthesized
auauaugauaaagcuuaccaaau

SEQ ID NO: 40248 - RNA, 23 nt, artificial
  Chemically synthesized
uauaugauaaagcuuaccaaaug

SEQ ID NO: 40249 - RNA, 23 nt, artificial
  Chemically synthesized
uaauuacaaaguccaaacaggca

SEQ ID NO: 40250 - RNA, 23 nt, artificial
  Chemically synthesized
gauuaaggucugucagugggcug

SEQ ID NO: 40251 - RNA, 23 nt, artificial
  Chemically synthesized
uuaaggucugucagugggcugau

SEQ ID NO: 40252 - RNA, 23 nt, artificial
  Chemically synthesized
uuaauuaaaaccucuccuuacaa

SEQ ID NO: 40253 - RNA, 23 nt, artificial
  Chemically synthesized
cguugauuucgcugcuccauuua

SEQ ID NO: 40254 - RNA, 23 nt, artificial
  Chemically synthesized
ccaguuuguuuucaacaaaaaca

SEQ ID NO: 40255 - RNA, 23 nt, artificial
  Chemically synthesized
caguuuguuuucaacaaaaacaa

SEQ ID NO: 40256 - RNA, 23 nt, artificial
  Chemically synthesized
aguuuguuuucaacaaaaacaac

SEQ ID NO: 40257 - RNA, 23 nt, artificial
  Chemically synthesized
guuuguuuucaacaaaaacaaca

SEQ ID NO: 40258 - RNA, 23 nt, artificial
  Chemically synthesized
uuuguuuucaacaaaaacaacaa

SEQ ID NO: 40259 - RNA, 23 nt, artificial
  Chemically synthesized
accauacccuuugaggaaagcuc

SEQ ID NO: 40260 - RNA, 23 nt, artificial
  Chemically synthesized
ccauacccuuugaggaaagcucc

SEQ ID NO: 40261 - RNA, 23 nt, artificial
  Chemically synthesized
cauacccuuugaggaaagcucca

SEQ ID NO: 40262 - RNA, 23 nt, artificial
  Chemically synthesized
auacccuuugaggaaagcuccaa

SEQ ID NO: 40263 - RNA, 23 nt, artificial
  Chemically synthesized
uacccuuugaggaaagcuccaac

SEQ ID NO: 40264 - RNA, 23 nt, artificial
  Chemically synthesized
uuuuuuguuuuaauuaaaaccuc

SEQ ID NO: 40265 - RNA, 23 nt, artificial
  Chemically synthesized
uuuuuguuuuaauuaaaaccucu

SEQ ID NO: 40266 - RNA, 23 nt, artificial
  Chemically synthesized
uuuuguuuuaauuaaaaccucuc

SEQ ID NO: 40267 - RNA, 23 nt, artificial
  Chemically synthesized
cggcuuguucuugcuggagccgu

SEQ ID NO: 40268 - RNA, 23 nt, artificial
  Chemically synthesized
ggcuuguucuugcuggagccguu

SEQ ID NO: 40269 - RNA, 23 nt, artificial
  Chemically synthesized
gcuuguucuugcuggagccguug

SEQ ID NO: 40270 - RNA, 23 nt, artificial
  Chemically synthesized
cuuguucuugcuggagccguuga

SEQ ID NO: 40271 - RNA, 23 nt, artificial
  Chemically synthesized
gguugguccucucuuucuucggu

SEQ ID NO: 40272 - RNA, 23 nt, artificial
  Chemically synthesized
guugguccucucuuucuucgguu

SEQ ID NO: 40273 - RNA, 23 nt, artificial
  Chemically synthesized
ccgcuugacgugcggcuuguucu

SEQ ID NO: 40274 - RNA, 23 nt, artificial
  Chemically synthesized
cgcuugacgugcggcuuguucuu

SEQ ID NO: 40275 - RNA, 23 nt, artificial
  Chemically synthesized
gcuugacgugcggcuuguucuug

SEQ ID NO: 40276 - RNA, 23 nt, artificial
  Chemically synthesized
cuugacgugcggcuuguucuugc

SEQ ID NO: 40277 - RNA, 23 nt, artificial
  Chemically synthesized
ggaauucugguugguccucucuu

SEQ ID NO: 40278 - RNA, 23 nt, artificial
  Chemically synthesized
gaauucugguugguccucucuuu

SEQ ID NO: 40279 - RNA, 23 nt, artificial
  Chemically synthesized
ugcuuuaagauuuuauucuacug

SEQ ID NO: 40280 - RNA, 23 nt, artificial
  Chemically synthesized
gcuuuaagauuuuauucuacuga

SEQ ID NO: 40281 - RNA, 23 nt, artificial
  Chemically synthesized
cuuuaagauuuuauucuacugac

SEQ ID NO: 40282 - RNA, 23 nt, artificial
  Chemically synthesized
uuuaagauuuuauucuacugacu

SEQ ID NO: 40283 - RNA, 23 nt, artificial
  Chemically synthesized
uuaagauuuuauucuacugacuu

SEQ ID NO: 40284 - RNA, 23 nt, artificial
  Chemically synthesized
uuuucuuuaauuacugcuaaaaa

SEQ ID NO: 40285 - RNA, 23 nt, artificial
  Chemically synthesized
cucguucagaagucuccagagcu

SEQ ID NO: 40286 - RNA, 23 nt, artificial
  Chemically synthesized
ucguucagaagucuccagagcuu

SEQ ID NO: 40287 - RNA, 23 nt, artificial
  Chemically synthesized
cguucagaagucuccagagcuug

SEQ ID NO: 40288 - RNA, 23 nt, artificial
  Chemically synthesized
guucagaagucuccagagcuugc

SEQ ID NO: 40289 - RNA, 23 nt, artificial
  Chemically synthesized
cuauuuuaaagaagguaaaauug

SEQ ID NO: 40290 - RNA, 23 nt, artificial
  Chemically synthesized
uauuuuaaagaagguaaaauugg

SEQ ID NO: 40291 - RNA, 23 nt, artificial
  Chemically synthesized
auuuuaaagaagguaaaauugga

SEQ ID NO: 40292 - RNA, 23 nt, artificial
  Chemically synthesized
uuuuaaagaagguaaaauuggaa

SEQ ID NO: 40293 - RNA, 23 nt, artificial
  Chemically synthesized
uuuaaagaagguaaaauuggaaa

SEQ ID NO: 40294 - RNA, 23 nt, artificial
  Chemically synthesized
aggguuuaaaaaguccaguuucu

SEQ ID NO: 40295 - RNA, 23 nt, artificial
  Chemically synthesized
cauucccagaacagauuucaucu

SEQ ID NO: 40296 - RNA, 23 nt, artificial
  Chemically synthesized
uuaaagaagguaaaauuggaaaa

SEQ ID NO: 40297 - RNA, 23 nt, artificial
  Chemically synthesized
guuuuuaaauguuaauacaacag

SEQ ID NO: 40298 - RNA, 23 nt, artificial
  Chemically synthesized
uuuuuaaauguuaauacaacagg

SEQ ID NO: 40299 - RNA, 23 nt, artificial
  Chemically synthesized
uuuuaaauguuaauacaacagga

SEQ ID NO: 40300 - RNA, 23 nt, artificial
  Chemically synthesized
uuuaaauguuaauacaacaggau

SEQ ID NO: 40301 - RNA, 23 nt, artificial
  Chemically synthesized
uuaaauguuaauacaacaggauu

SEQ ID NO: 40302 - RNA, 23 nt, artificial
  Chemically synthesized
ggacuuuuuucuuuaauuacugc

SEQ ID NO: 40303 - RNA, 23 nt, artificial
  Chemically synthesized
ccagucaguuucgagcuccgcuu

SEQ ID NO: 40304 - RNA, 23 nt, artificial
  Chemically synthesized
cagucaguuucgagcuccgcuuu

SEQ ID NO: 40305 - RNA, 23 nt, artificial
  Chemically synthesized
gucaguuucgagcuccgcuuucg

SEQ ID NO: 40306 - RNA, 23 nt, artificial
  Chemically synthesized
ucaguuucgagcuccgcuuucgg

SEQ ID NO: 40307 - RNA, 23 nt, artificial
  Chemically synthesized
cauauuaugagugcuuuaagauu

SEQ ID NO: 40308 - RNA, 23 nt, artificial
  Chemically synthesized
auauuaugagugcuuuaagauuu

SEQ ID NO: 40309 - RNA, 23 nt, artificial
  Chemically synthesized
uauuaugagugcuuuaagauuuu

SEQ ID NO: 40310 - RNA, 23 nt, artificial
  Chemically synthesized
auuaugagugcuuuaagauuuua

SEQ ID NO: 40311 - RNA, 23 nt, artificial
  Chemically synthesized
uuaugagugcuuuaagauuuuau

SEQ ID NO: 40312 - RNA, 23 nt, artificial
  Chemically synthesized
ucuccaucauccuccacgcuugc

SEQ ID NO: 40313 - RNA, 23 nt, artificial
  Chemically synthesized
cuccaucauccuccacgcuugcu

SEQ ID NO: 40314 - RNA, 23 nt, artificial
  Chemically synthesized
uccaucauccuccacgcuugcuc

SEQ ID NO: 40315 - RNA, 23 nt, artificial
  Chemically synthesized
uuucuuaaguuacagaaguaucu

SEQ ID NO: 40316 - RNA, 23 nt, artificial
  Chemically synthesized
uucuuaaguuacagaaguaucuu

SEQ ID NO: 40317 - RNA, 23 nt, artificial
  Chemically synthesized
ucuuaaguuacagaaguaucuuu

SEQ ID NO: 40318 - RNA, 23 nt, artificial
  Chemically synthesized
cuuaaguuacagaaguaucuuuu

SEQ ID NO: 40319 - RNA, 23 nt, artificial
  Chemically synthesized
uuaaguuacagaaguaucuuuuu

SEQ ID NO: 40320 - RNA, 23 nt, artificial
  Chemically synthesized
guacuuguaauccgggugguccu

SEQ ID NO: 40321 - RNA, 23 nt, artificial
  Chemically synthesized
uacuuguaauccgggugguccuu

SEQ ID NO: 40322 - RNA, 23 nt, artificial
  Chemically synthesized
auguuucccagcagcaccguuuu

SEQ ID NO: 40323 - RNA, 23 nt, artificial
  Chemically synthesized
uguuucccagcagcaccguuuua

SEQ ID NO: 40324 - RNA, 23 nt, artificial
  Chemically synthesized
guuucccagcagcaccguuuuaa

SEQ ID NO: 40325 - RNA, 23 nt, artificial
  Chemically synthesized
uguuuucaacaaaaacaacaaag

SEQ ID NO: 40326 - RNA, 23 nt, artificial
  Chemically synthesized
guuuucaacaaaaacaacaaaga

SEQ ID NO: 40327 - RNA, 23 nt, artificial
  Chemically synthesized
uuuucaacaaaaacaacaaagaa

SEQ ID NO: 40328 - RNA, 23 nt, artificial
  Chemically synthesized
uuucaacaaaaacaacaaagaaa

SEQ ID NO: 40329 - RNA, 23 nt, artificial
  Chemically synthesized
uucaacaaaaacaacaaagaaaa

SEQ ID NO: 40330 - RNA, 23 nt, artificial
  Chemically synthesized
cacaauauaaggcagcccaaagg

SEQ ID NO: 40331 - RNA, 23 nt, artificial
  Chemically synthesized
acaauauaaggcagcccaaaggu

SEQ ID NO: 40332 - RNA, 23 nt, artificial
  Chemically synthesized
caauauaaggcagcccaaagguc

SEQ ID NO: 40333 - RNA, 23 nt, artificial
  Chemically synthesized
aauauaaggcagcccaaaggucu

SEQ ID NO: 40334 - RNA, 23 nt, artificial
  Chemically synthesized
aaaaaguccaguuucucguugau

SEQ ID NO: 40335 - RNA, 23 nt, artificial
  Chemically synthesized
ccugcaaagaaaaguuuccgggg

SEQ ID NO: 40336 - RNA, 23 nt, artificial
  Chemically synthesized
cugcaaagaaaaguuuccggggu

SEQ ID NO: 40337 - RNA, 23 nt, artificial
  Chemically synthesized
ugcaaagaaaaguuuccgggguu

SEQ ID NO: 40338 - RNA, 23 nt, artificial
  Chemically synthesized
ugguugcaagaaaagcuagggca

SEQ ID NO: 40339 - RNA, 23 nt, artificial
  Chemically synthesized
gguugcaagaaaagcuagggcac

SEQ ID NO: 40340 - RNA, 23 nt, artificial
  Chemically synthesized
guugcaagaaaagcuagggcaca

SEQ ID NO: 40341 - RNA, 23 nt, artificial
  Chemically synthesized
ucuuuuuaaaaagaucugcuuuu

SEQ ID NO: 40342 - RNA, 23 nt, artificial
  Chemically synthesized
cuuuuuaaaaagaucugcuuuua

SEQ ID NO: 40343 - RNA, 23 nt, artificial
  Chemically synthesized
uuuuuaaaaagaucugcuuuuau

SEQ ID NO: 40344 - RNA, 23 nt, artificial
  Chemically synthesized
uuuuaaaaagaucugcuuuuaua

SEQ ID NO: 40345 - RNA, 23 nt, artificial
  Chemically synthesized
uuuaaaaagaucugcuuuuauac

SEQ ID NO: 40346 - RNA, 23 nt, artificial
  Chemically synthesized
uuauacaaaucuagggugaggaa

SEQ ID NO: 40347 - RNA, 23 nt, artificial
  Chemically synthesized
uuccagucaguuucgagcuccgc

SEQ ID NO: 40348 - RNA, 23 nt, artificial
  Chemically synthesized
uaugagugcuuuaagauuuuauu

SEQ ID NO: 40349 - RNA, 23 nt, artificial
  Chemically synthesized
aucuuuuuaaaaagaucugcuuu

SEQ ID NO: 40350 - RNA, 23 nt, artificial
  Chemically synthesized
cugcuccgucuugaugugcguuc

SEQ ID NO: 40351 - RNA, 23 nt, artificial
  Chemically synthesized
ugcuccgucuugaugugcguucg

SEQ ID NO: 40352 - RNA, 23 nt, artificial
  Chemically synthesized
gcuccgucuugaugugcguucgc

SEQ ID NO: 40353 - RNA, 23 nt, artificial
  Chemically synthesized
cuccgucuugaugugcguucgcu

SEQ ID NO: 40354 - RNA, 23 nt, artificial
  Chemically synthesized
ugauuucgcugcuccauuuagcc

SEQ ID NO: 40355 - RNA, 23 nt, artificial
  Chemically synthesized
gauuucgcugcuccauuuagcca

SEQ ID NO: 40356 - RNA, 23 nt, artificial
  Chemically synthesized
auuucgcugcuccauuuagccaa

SEQ ID NO: 40357 - RNA, 23 nt, artificial
  Chemically synthesized
uaaggcagcccaaaggucugugg

SEQ ID NO: 40358 - RNA, 23 nt, artificial
  Chemically synthesized
caaaucuagggugaggaauacaa

SEQ ID NO: 40359 - RNA, 23 nt, artificial
  Chemically synthesized
aaaucuagggugaggaauacaaa

SEQ ID NO: 40360 - RNA, 23 nt, artificial
  Chemically synthesized
ucuagggugaggaauacaaagaa

SEQ ID NO: 40361 - RNA, 23 nt, artificial
  Chemically synthesized
agauuucaucuccuuugcuugcc

SEQ ID NO: 40362 - RNA, 23 nt, artificial
  Chemically synthesized
cccuuugaggaaagcuccaacaa

SEQ ID NO: 40363 - RNA, 23 nt, artificial
  Chemically synthesized
ccuuugaggaaagcuccaacaac

SEQ ID NO: 40364 - RNA, 23 nt, artificial
  Chemically synthesized
cuuugaggaaagcuccaacaacc

SEQ ID NO: 40365 - RNA, 23 nt, artificial
  Chemically synthesized
cagcaccguuuuaaggcucaagg

SEQ ID NO: 40366 - RNA, 23 nt, artificial
  Chemically synthesized
agcaccguuuuaaggcucaaggu

SEQ ID NO: 40367 - RNA, 23 nt, artificial
  Chemically synthesized
gcaccguuuuaaggcucaaggug

SEQ ID NO: 40368 - RNA, 23 nt, artificial
  Chemically synthesized
caccguuuuaaggcucaaggugu

SEQ ID NO: 40369 - RNA, 23 nt, artificial
  Chemically synthesized
accguuuuaaggcucaagguguu

SEQ ID NO: 40370 - RNA, 23 nt, artificial
  Chemically synthesized
gccuuuagcuuaaaugucuuuaa

SEQ ID NO: 40371 - RNA, 23 nt, artificial
  Chemically synthesized
ccuuuagcuuaaaugucuuuaag

SEQ ID NO: 40372 - RNA, 23 nt, artificial
  Chemically synthesized
uuuagcuuaaaugucuuuaagga

SEQ ID NO: 40373 - RNA, 23 nt, artificial
  Chemically synthesized
cuguacaaaaauacucugguugc

SEQ ID NO: 40374 - RNA, 23 nt, artificial
  Chemically synthesized
guacaaaaauacucugguugcaa

SEQ ID NO: 40375 - RNA, 23 nt, artificial
  Chemically synthesized
cuuucuucgguuauuuuuaggau

SEQ ID NO: 40376 - RNA, 23 nt, artificial
  Chemically synthesized
ccauaauugcaaaauaaggccuu

SEQ ID NO: 40377 - RNA, 23 nt, artificial
  Chemically synthesized
cauaauugcaaaauaaggccuuu

SEQ ID NO: 40378 - RNA, 23 nt, artificial
  Chemically synthesized
auaauugcaaaauaaggccuuua

SEQ ID NO: 40379 - RNA, 23 nt, artificial
  Chemically synthesized
gggguccaggagauucauacgcg

SEQ ID NO: 40380 - RNA, 23 nt, artificial
  Chemically synthesized
ggguccaggagauucauacgcgg

SEQ ID NO: 40381 - RNA, 23 nt, artificial
  Chemically synthesized
gguccaggagauucauacgcggg

SEQ ID NO: 40382 - RNA, 23 nt, artificial
  Chemically synthesized
guccaggagauucauacgcgggc

SEQ ID NO: 40383 - RNA, 23 nt, artificial
  Chemically synthesized
uccaggagauucauacgcgggcc

SEQ ID NO: 40384 - RNA, 23 nt, artificial
  Chemically synthesized
ugcuugccuuuuaccucuuucuu

SEQ ID NO: 40385 - RNA, 23 nt, artificial
  Chemically synthesized
gcuugccuuuuaccucuuucuua

SEQ ID NO: 40386 - RNA, 23 nt, artificial
  Chemically synthesized
cuugccuuuuaccucuuucuuaa

SEQ ID NO: 40387 - RNA, 23 nt, artificial
  Chemically synthesized
uaaauguuaauacaacaggauuu

SEQ ID NO: 40388 - RNA, 23 nt, artificial
  Chemically synthesized
aguaucuuuuuaaaaagaucugc

SEQ ID NO: 40389 - RNA, 23 nt, artificial
  Chemically synthesized
guaucuuuuuaaaaagaucugcu

SEQ ID NO: 40390 - RNA, 23 nt, artificial
  Chemically synthesized
uaucuuuuuaaaaagaucugcuu

SEQ ID NO: 40391 - RNA, 23 nt, artificial
  Chemically synthesized
cguuuuaaggcucaagguguuuu

SEQ ID NO: 40392 - RNA, 23 nt, artificial
  Chemically synthesized
guuuuaaggcucaagguguuuuu

SEQ ID NO: 40393 - RNA, 23 nt, artificial
  Chemically synthesized
ucgguguagucguacugugagcg

SEQ ID NO: 40394 - RNA, 23 nt, artificial
  Chemically synthesized
cgguguagucguacugugagcgg

SEQ ID NO: 40395 - RNA, 23 nt, artificial
  Chemically synthesized
gguguagucguacugugagcggg

SEQ ID NO: 40396 - RNA, 23 nt, artificial
  Chemically synthesized
guguagucguacugugagcgggu

SEQ ID NO: 40397 - RNA, 23 nt, artificial
  Chemically synthesized
uguagucguacugugagcgggug

SEQ ID NO: 40398 - RNA, 23 nt, artificial
  Chemically synthesized
uucgcugcuccauuuagccaagg

SEQ ID NO: 40399 - RNA, 23 nt, artificial
  Chemically synthesized
acagaugaccauacccuuugagg

SEQ ID NO: 40400 - RNA, 23 nt, artificial
  Chemically synthesized
cagaugaccauacccuuugagga

SEQ ID NO: 40401 - RNA, 23 nt, artificial
  Chemically synthesized
agaugaccauacccuuugaggaa

SEQ ID NO: 40402 - RNA, 23 nt, artificial
  Chemically synthesized
gaugaccauacccuuugaggaaa

SEQ ID NO: 40403 - RNA, 23 nt, artificial
  Chemically synthesized
aagguuaacugcugguguucuga

SEQ ID NO: 40404 - RNA, 23 nt, artificial
  Chemically synthesized
agguuaacugcugguguucugag

SEQ ID NO: 40405 - RNA, 23 nt, artificial
  Chemically synthesized
gguuaacugcugguguucugaga

SEQ ID NO: 40406 - RNA, 23 nt, artificial
  Chemically synthesized
aggaauuaagcaaaguuaacccc

SEQ ID NO: 40407 - RNA, 23 nt, artificial
  Chemically synthesized
ggaauuaagcaaaguuaaccccc

SEQ ID NO: 40408 - RNA, 23 nt, artificial
  Chemically synthesized
gaauuaagcaaaguuaaccccca

SEQ ID NO: 40409 - RNA, 23 nt, artificial
  Chemically synthesized
aauuaagcaaaguuaacccccaa

SEQ ID NO: 40410 - RNA, 23 nt, artificial
  Chemically synthesized
agauguagagaaauauggaugac

SEQ ID NO: 40411 - RNA, 23 nt, artificial
  Chemically synthesized
gauguagagaaauauggaugaca

SEQ ID NO: 40412 - RNA, 23 nt, artificial
  Chemically synthesized
aguuuccaguuuguuuucaacaa

SEQ ID NO: 40413 - RNA, 23 nt, artificial
  Chemically synthesized
guuuccaguuuguuuucaacaaa

SEQ ID NO: 40414 - RNA, 23 nt, artificial
  Chemically synthesized
uuuccaguuuguuuucaacaaaa

SEQ ID NO: 40415 - RNA, 23 nt, artificial
  Chemically synthesized
uuccaguuuguuuucaacaaaaa

SEQ ID NO: 40416 - RNA, 23 nt, artificial
  Chemically synthesized
gcucaagguguuuuucucuucuu

SEQ ID NO: 40417 - RNA, 23 nt, artificial
  Chemically synthesized
aggcauuuauacaaaucuagggu

SEQ ID NO: 40418 - RNA, 23 nt, artificial
  Chemically synthesized
uaagauuuuauucuacugacuuc

SEQ ID NO: 40419 - RNA, 23 nt, artificial
  Chemically synthesized
cuccugcucgucggucaucuuca

SEQ ID NO: 40420 - RNA, 23 nt, artificial
  Chemically synthesized
ccugcucgucggucaucuucaug

SEQ ID NO: 40421 - RNA, 23 nt, artificial
  Chemically synthesized
cugcucgucggucaucuucauga

SEQ ID NO: 40422 - RNA, 23 nt, artificial
  Chemically synthesized
ugcucgucggucaucuucaugaa

SEQ ID NO: 40423 - RNA, 23 nt, artificial
  Chemically synthesized
gccuuuuaccucuuucuuaagac

SEQ ID NO: 40424 - RNA, 23 nt, artificial
  Chemically synthesized
ccuuuuaccucuuucuuaagacu

SEQ ID NO: 40425 - RNA, 23 nt, artificial
  Chemically synthesized
cacacugaucacacgauucucca

SEQ ID NO: 40426 - RNA, 23 nt, artificial
  Chemically synthesized
aaaguccaguuucucguugauuu

SEQ ID NO: 40427 - RNA, 23 nt, artificial
  Chemically synthesized
uacucugguugcaagaaaagcua

SEQ ID NO: 40428 - RNA, 23 nt, artificial
  Chemically synthesized
cucugguugcaagaaaagcuagg

SEQ ID NO: 40429 - RNA, 23 nt, artificial
  Chemically synthesized
cuagggugaggaauacaaagaaa

SEQ ID NO: 40430 - RNA, 23 nt, artificial
  Chemically synthesized
cucgucggucaucuucaugaagg

SEQ ID NO: 40431 - RNA, 23 nt, artificial
  Chemically synthesized
ucgucggucaucuucaugaaggg

SEQ ID NO: 40432 - RNA, 23 nt, artificial
  Chemically synthesized
cgucggucaucuucaugaagggg

SEQ ID NO: 40433 - RNA, 23 nt, artificial
  Chemically synthesized
gucggucaucuucaugaaggggu

SEQ ID NO: 40434 - RNA, 23 nt, artificial
  Chemically synthesized
ucggucaucuucaugaagggguc

SEQ ID NO: 40435 - RNA, 23 nt, artificial
  Chemically synthesized
acacuacauuugcaaucucucau

SEQ ID NO: 40436 - RNA, 23 nt, artificial
  Chemically synthesized
cacuacauuugcaaucucucauu

SEQ ID NO: 40437 - RNA, 23 nt, artificial
  Chemically synthesized
cuacauuugcaaucucucauuua

SEQ ID NO: 40438 - RNA, 23 nt, artificial
  Chemically synthesized
uacauuugcaaucucucauuuau

SEQ ID NO: 40439 - RNA, 23 nt, artificial
  Chemically synthesized
ccucuuucuuaagacugcaguga

SEQ ID NO: 40440 - RNA, 23 nt, artificial
  Chemically synthesized
cucuuucuuaagacugcagugaa

SEQ ID NO: 40441 - RNA, 23 nt, artificial
  Chemically synthesized
ccuuaaaucgcaaagccugagga

SEQ ID NO: 40442 - RNA, 23 nt, artificial
  Chemically synthesized
cuuaaaucgcaaagccugaggaa

SEQ ID NO: 40443 - RNA, 23 nt, artificial
  Chemically synthesized
uuaaaucgcaaagccugaggaau

SEQ ID NO: 40444 - RNA, 23 nt, artificial
  Chemically synthesized
caaaaugguaaugaaucauacac

SEQ ID NO: 40445 - RNA, 23 nt, artificial
  Chemically synthesized
aaaaugguaaugaaucauacaca

SEQ ID NO: 40446 - RNA, 23 nt, artificial
  Chemically synthesized
aaugguaaugaaucauacacagu

SEQ ID NO: 40447 - RNA, 23 nt, artificial
  Chemically synthesized
augguaaugaaucauacacagua

SEQ ID NO: 40448 - RNA, 23 nt, artificial
  Chemically synthesized
cuccuuaaaucgcaaagccugag

SEQ ID NO: 40449 - RNA, 23 nt, artificial
  Chemically synthesized
uuuaaugcaauguauauuuauug

SEQ ID NO: 40450 - RNA, 23 nt, artificial
  Chemically synthesized
uuaaugcaauguauauuuauugu

SEQ ID NO: 40451 - RNA, 23 nt, artificial
  Chemically synthesized
uaaugcaauguauauuuauugua

SEQ ID NO: 40452 - RNA, 23 nt, artificial
  Chemically synthesized
aaugcaauguauauuuauuguaa

SEQ ID NO: 40453 - RNA, 23 nt, artificial
  Chemically synthesized
augcaauguauauuuauuguaaa

SEQ ID NO: 40454 - RNA, 23 nt, artificial
  Chemically synthesized
gucuuggaaauuuggguacgagu

SEQ ID NO: 40455 - RNA, 23 nt, artificial
  Chemically synthesized
cagguuucuuaaguuacagaagu

SEQ ID NO: 40456 - RNA, 23 nt, artificial
  Chemically synthesized
agguuucuuaaguuacagaagua

SEQ ID NO: 40457 - RNA, 23 nt, artificial
  Chemically synthesized
gguuucuuaaguuacagaaguau

SEQ ID NO: 40458 - RNA, 23 nt, artificial
  Chemically synthesized
guuucuuaaguuacagaaguauc

SEQ ID NO: 40459 - RNA, 23 nt, artificial
  Chemically synthesized
cuccuccuuaaaucgcaaagccu

SEQ ID NO: 40460 - RNA, 23 nt, artificial
  Chemically synthesized
uccuccuuaaaucgcaaagccug

SEQ ID NO: 40461 - RNA, 23 nt, artificial
  Chemically synthesized
ccuccuuaaaucgcaaagccuga

SEQ ID NO: 40462 - RNA, 23 nt, artificial
  Chemically synthesized
ccaaagggaauucugguuggucc

SEQ ID NO: 40463 - RNA, 23 nt, artificial
  Chemically synthesized
caaagggaauucugguugguccu

SEQ ID NO: 40464 - RNA, 23 nt, artificial
  Chemically synthesized
aaagggaauucugguugguccuc

SEQ ID NO: 40465 - RNA, 23 nt, artificial
  Chemically synthesized
uuucuuuuuaaugcaauguauau

SEQ ID NO: 40466 - RNA, 23 nt, artificial
  Chemically synthesized
cuuuuaccuaaagacaaaauaug

SEQ ID NO: 40467 - RNA, 23 nt, artificial
  Chemically synthesized
uuuuaccuaaagacaaaauauga

SEQ ID NO: 40468 - RNA, 23 nt, artificial
  Chemically synthesized
uuuaccuaaagacaaaauaugau

SEQ ID NO: 40469 - RNA, 23 nt, artificial
  Chemically synthesized
uuaccuaaagacaaaauaugauu

SEQ ID NO: 40470 - RNA, 23 nt, artificial
  Chemically synthesized
uaccuaaagacaaaauaugauuu

SEQ ID NO: 40471 - RNA, 23 nt, artificial
  Chemically synthesized
gcaaauguuucccagcagcaccg

SEQ ID NO: 40472 - RNA, 23 nt, artificial
  Chemically synthesized
caaauguuucccagcagcaccgu

SEQ ID NO: 40473 - RNA, 23 nt, artificial
  Chemically synthesized
cucgauguuggagaugacgucgc

SEQ ID NO: 40474 - RNA, 23 nt, artificial
  Chemically synthesized
ucgauguuggagaugacgucgcu

SEQ ID NO: 40475 - RNA, 23 nt, artificial
  Chemically synthesized
cgauguuggagaugacgucgcug

SEQ ID NO: 40476 - RNA, 23 nt, artificial
  Chemically synthesized
gauguuggagaugacgucgcugc

SEQ ID NO: 40477 - RNA, 23 nt, artificial
  Chemically synthesized
auguuggagaugacgucgcugcu

SEQ ID NO: 40478 - RNA, 23 nt, artificial
  Chemically synthesized
cuuaagacugcagugaacaagca

SEQ ID NO: 40479 - RNA, 23 nt, artificial
  Chemically synthesized
uuaagacugcagugaacaagcaa

SEQ ID NO: 40480 - RNA, 23 nt, artificial
  Chemically synthesized
gucuuuaaggaagaagaagaaga

SEQ ID NO: 40481 - RNA, 23 nt, artificial
  Chemically synthesized
ucuuuaaggaagaagaagaagaa

SEQ ID NO: 40482 - RNA, 23 nt, artificial
  Chemically synthesized
cuuuaaggaagaagaagaagaag

SEQ ID NO: 40483 - RNA, 23 nt, artificial
  Chemically synthesized
uuuaaggaagaagaagaagaaga

SEQ ID NO: 40484 - RNA, 23 nt, artificial
  Chemically synthesized
uuaaggaagaagaagaagaagaa

SEQ ID NO: 40485 - RNA, 23 nt, artificial
  Chemically synthesized
gcuagggcacacuguucaacuaa

SEQ ID NO: 40486 - RNA, 23 nt, artificial
  Chemically synthesized
ccucucuuucuucgguuauuuuu

SEQ ID NO: 40487 - RNA, 23 nt, artificial
  Chemically synthesized
cucguugacaucgaaggucucga

SEQ ID NO: 40488 - RNA, 23 nt, artificial
  Chemically synthesized
ucguugacaucgaaggucucgau

SEQ ID NO: 40489 - RNA, 23 nt, artificial
  Chemically synthesized
cguugacaucgaaggucucgaug

SEQ ID NO: 40490 - RNA, 23 nt, artificial
  Chemically synthesized
guugacaucgaaggucucgaugu

SEQ ID NO: 40491 - RNA, 23 nt, artificial
  Chemically synthesized
uugacaucgaaggucucgauguu

SEQ ID NO: 40492 - RNA, 23 nt, artificial
  Chemically synthesized
gaucugcuuuuauacagaaauug

SEQ ID NO: 40493 - RNA, 23 nt, artificial
  Chemically synthesized
aucugcuuuuauacagaaauuga

SEQ ID NO: 40494 - RNA, 23 nt, artificial
  Chemically synthesized
ucugcuuuuauacagaaauugaa

SEQ ID NO: 40495 - RNA, 23 nt, artificial
  Chemically synthesized
cugcugaaacauucccagaacag

SEQ ID NO: 40496 - RNA, 23 nt, artificial
  Chemically synthesized
ugcugaaacauucccagaacaga

SEQ ID NO: 40497 - RNA, 23 nt, artificial
  Chemically synthesized
gcugaaacauucccagaacagau

SEQ ID NO: 40498 - RNA, 23 nt, artificial
  Chemically synthesized
cugaaacauucccagaacagauu

SEQ ID NO: 40499 - RNA, 23 nt, artificial
  Chemically synthesized
guuuacucccauaauugcaaaau

SEQ ID NO: 40500 - RNA, 23 nt, artificial
  Chemically synthesized
uuuacucccauaauugcaaaaua

SEQ ID NO: 40501 - RNA, 23 nt, artificial
  Chemically synthesized
ggaaauuuggguacgaguugccu

SEQ ID NO: 40502 - RNA, 23 nt, artificial
  Chemically synthesized
uuuauucuacugacuucuaaaac

SEQ ID NO: 40503 - RNA, 23 nt, artificial
  Chemically synthesized
uuauucuacugacuucuaaaacu

SEQ ID NO: 40504 - RNA, 23 nt, artificial
  Chemically synthesized
cgccugcugcuuggacauccaca

SEQ ID NO: 40505 - RNA, 23 nt, artificial
  Chemically synthesized
gccugcugcuuggacauccacac

SEQ ID NO: 40506 - RNA, 23 nt, artificial
  Chemically synthesized
ccugcugcuuggacauccacacg

SEQ ID NO: 40507 - RNA, 23 nt, artificial
  Chemically synthesized
cugcugcuuggacauccacacgu

SEQ ID NO: 40508 - RNA, 23 nt, artificial
  Chemically synthesized
ugcugcuuggacauccacacgug

SEQ ID NO: 40509 - RNA, 23 nt, artificial
  Chemically synthesized
uggguacgaguugccuuuagcuu

SEQ ID NO: 40510 - RNA, 23 nt, artificial
  Chemically synthesized
ggguacgaguugccuuuagcuua

SEQ ID NO: 40511 - RNA, 23 nt, artificial
  Chemically synthesized
gguacgaguugccuuuagcuuaa

SEQ ID NO: 40512 - RNA, 23 nt, artificial
  Chemically synthesized
guacgaguugccuuuagcuuaaa

SEQ ID NO: 40513 - RNA, 23 nt, artificial
  Chemically synthesized
caacuaagaguaguuuagcuguu

SEQ ID NO: 40514 - RNA, 23 nt, artificial
  Chemically synthesized
aacuaagaguaguuuagcuguug

SEQ ID NO: 40515 - RNA, 23 nt, artificial
  Chemically synthesized
ugucuugaagguuaacugcuggu

SEQ ID NO: 40516 - RNA, 23 nt, artificial
  Chemically synthesized
gucuugaagguuaacugcuggug

SEQ ID NO: 40517 - RNA, 23 nt, artificial
  Chemically synthesized
ccacugaaguuuccagucaguuu

SEQ ID NO: 40518 - RNA, 23 nt, artificial
  Chemically synthesized
cacugaaguuuccagucaguuuc

SEQ ID NO: 40519 - RNA, 23 nt, artificial
  Chemically synthesized
cugaaguuuccagucaguuucga

SEQ ID NO: 40520 - RNA, 23 nt, artificial
  Chemically synthesized
uaauuaaaaccucuccuuacaaa

SEQ ID NO: 40521 - RNA, 23 nt, artificial
  Chemically synthesized
aauuaaaaccucuccuuacaaaa

SEQ ID NO: 40522 - RNA, 23 nt, artificial
  Chemically synthesized
auuaaaaccucuccuuacaaaau

SEQ ID NO: 40523 - RNA, 23 nt, artificial
  Chemically synthesized
uuaaaaccucuccuuacaaaaua

SEQ ID NO: 40524 - RNA, 23 nt, artificial
  Chemically synthesized
gacaucgaaggucucgauguugg

SEQ ID NO: 40525 - RNA, 23 nt, artificial
  Chemically synthesized
acaucgaaggucucgauguugga

SEQ ID NO: 40526 - RNA, 23 nt, artificial
  Chemically synthesized
caucgaaggucucgauguuggag

SEQ ID NO: 40527 - RNA, 23 nt, artificial
  Chemically synthesized
aucgaaggucucgauguuggaga

SEQ ID NO: 40528 - RNA, 23 nt, artificial
  Chemically synthesized
ucgaaggucucgauguuggagau

SEQ ID NO: 40529 - RNA, 23 nt, artificial
  Chemically synthesized
uucuuuuuaaugcaauguauauu

SEQ ID NO: 40530 - RNA, 23 nt, artificial
  Chemically synthesized
gcucuccuucuucagaucgggcu

SEQ ID NO: 40531 - RNA, 23 nt, artificial
  Chemically synthesized
cucuccuucuucagaucgggcuc

SEQ ID NO: 40532 - RNA, 23 nt, artificial
  Chemically synthesized
ucuccuucuucagaucgggcucg

SEQ ID NO: 40533 - RNA, 23 nt, artificial
  Chemically synthesized
cuccuucuucagaucgggcucgc

SEQ ID NO: 40534 - RNA, 23 nt, artificial
  Chemically synthesized
uccuucuucagaucgggcucgcc

SEQ ID NO: 40535 - RNA, 23 nt, artificial
  Chemically synthesized
uaaaauagagaauauuccucaca

SEQ ID NO: 40536 - RNA, 23 nt, artificial
  Chemically synthesized
auaauuuaacaacagaugaccau

SEQ ID NO: 40537 - RNA, 23 nt, artificial
  Chemically synthesized
uaauuuaacaacagaugaccaua

SEQ ID NO: 40538 - RNA, 23 nt, artificial
  Chemically synthesized
cuugaagguuaacugcugguguu

SEQ ID NO: 40539 - RNA, 23 nt, artificial
  Chemically synthesized
ggaguucugguggucgguguagu

SEQ ID NO: 40540 - RNA, 23 nt, artificial
  Chemically synthesized
gaguucugguggucgguguaguc

SEQ ID NO: 40541 - RNA, 23 nt, artificial
  Chemically synthesized
aguucugguggucgguguagucg

SEQ ID NO: 40542 - RNA, 23 nt, artificial
  Chemically synthesized
guucugguggucgguguagucgu

SEQ ID NO: 40543 - RNA, 23 nt, artificial
  Chemically synthesized
cagguacuggucaaacucguuga

SEQ ID NO: 40544 - RNA, 23 nt, artificial
  Chemically synthesized
agguacuggucaaacucguugac

SEQ ID NO: 40545 - RNA, 23 nt, artificial
  Chemically synthesized
gguacuggucaaacucguugaca

SEQ ID NO: 40546 - RNA, 23 nt, artificial
  Chemically synthesized
guacuggucaaacucguugacau

SEQ ID NO: 40547 - RNA, 23 nt, artificial
  Chemically synthesized
gcaauccucaaacucucuagcca

SEQ ID NO: 40548 - RNA, 23 nt, artificial
  Chemically synthesized
caauccucaaacucucuagccac

SEQ ID NO: 40549 - RNA, 23 nt, artificial
  Chemically synthesized
aauccucaaacucucuagccaca

SEQ ID NO: 40550 - RNA, 23 nt, artificial
  Chemically synthesized
uccucacagaggacuuuuuucuu

SEQ ID NO: 40551 - RNA, 23 nt, artificial
  Chemically synthesized
ccucacagaggacuuuuuucuuu

SEQ ID NO: 40552 - RNA, 23 nt, artificial
  Chemically synthesized
cucacagaggacuuuuuucuuua

SEQ ID NO: 40553 - RNA, 23 nt, artificial
  Chemically synthesized
ucacagaggacuuuuuucuuuaa

SEQ ID NO: 40554 - RNA, 23 nt, artificial
  Chemically synthesized
aucacacgauucuccaucauccu

SEQ ID NO: 40555 - RNA, 23 nt, artificial
  Chemically synthesized
gcucgucggucaucuucaugaag

SEQ ID NO: 40556 - RNA, 23 nt, artificial
  Chemically synthesized
augauaaagcuuaccaaaugcuu

SEQ ID NO: 40557 - RNA, 23 nt, artificial
  Chemically synthesized
gauaaagcuuaccaaaugcuucu

SEQ ID NO: 40558 - RNA, 23 nt, artificial
  Chemically synthesized
auauauauaugauaaagcuuacc

SEQ ID NO: 40559 - RNA, 23 nt, artificial
  Chemically synthesized
gcucucguucagaagucuccaga

SEQ ID NO: 40560 - RNA, 23 nt, artificial
  Chemically synthesized
cucucguucagaagucuccagag

SEQ ID NO: 40561 - RNA, 23 nt, artificial
  Chemically synthesized
ccguuuuaaggcucaagguguuu

SEQ ID NO: 40562 - RNA, 23 nt, artificial
  Chemically synthesized
gccauauuaugagugcuuuaaga

SEQ ID NO: 40563 - RNA, 23 nt, artificial
  Chemically synthesized
ccauauuaugagugcuuuaagau

SEQ ID NO: 40564 - RNA, 23 nt, artificial
  Chemically synthesized
gcugcuuggacauccacacgugg

SEQ ID NO: 40565 - RNA, 23 nt, artificial
  Chemically synthesized
cugcuuggacauccacacguggc

SEQ ID NO: 40566 - RNA, 23 nt, artificial
  Chemically synthesized
ugcuuggacauccacacguggcc

SEQ ID NO: 40567 - RNA, 23 nt, artificial
  Chemically synthesized
ugagugcuuuaagauuuuauucu

SEQ ID NO: 40568 - RNA, 23 nt, artificial
  Chemically synthesized
gagugcuuuaagauuuuauucua

SEQ ID NO: 40569 - RNA, 23 nt, artificial
  Chemically synthesized
agugcuuuaagauuuuauucuac

SEQ ID NO: 40570 - RNA, 23 nt, artificial
  Chemically synthesized
gugcuuuaagauuuuauucuacu

SEQ ID NO: 40571 - RNA, 23 nt, artificial
  Chemically synthesized
aaaaauaauuacaaaguccaaac

SEQ ID NO: 40572 - RNA, 23 nt, artificial
  Chemically synthesized
aaaauaauuacaaaguccaaaca

SEQ ID NO: 40573 - RNA, 23 nt, artificial
  Chemically synthesized
aaauaauuacaaaguccaaacag

SEQ ID NO: 40574 - RNA, 23 nt, artificial
  Chemically synthesized
aaugucuuuaaggaagaagaaga

SEQ ID NO: 40575 - RNA, 23 nt, artificial
  Chemically synthesized
augucuuuaaggaagaagaagaa

SEQ ID NO: 40576 - RNA, 23 nt, artificial
  Chemically synthesized
aucuaaaaauauguauaaauccc

SEQ ID NO: 40577 - RNA, 23 nt, artificial
  Chemically synthesized
ucuaaaaauauguauaaaucccc

SEQ ID NO: 40578 - RNA, 23 nt, artificial
  Chemically synthesized
cuaaaaauauguauaaauccccu

SEQ ID NO: 40579 - RNA, 23 nt, artificial
  Chemically synthesized
uaaaaauauguauaaauccccuc

SEQ ID NO: 40580 - RNA, 23 nt, artificial
  Chemically synthesized
aaaaauauguauaaauccccuca

SEQ ID NO: 40581 - RNA, 23 nt, artificial
  Chemically synthesized
agcuuuuaccuaaagacaaaaua

SEQ ID NO: 40582 - RNA, 23 nt, artificial
  Chemically synthesized
gcuuuuaccuaaagacaaaauau

SEQ ID NO: 40583 - RNA, 23 nt, artificial
  Chemically synthesized
uuuauacaaaaaaagaaacaagu

SEQ ID NO: 40584 - RNA, 23 nt, artificial
  Chemically synthesized
uuauacaaaaaaagaaacaaguu

SEQ ID NO: 40585 - RNA, 23 nt, artificial
  Chemically synthesized
uauacaaaaaaagaaacaaguuu

SEQ ID NO: 40586 - RNA, 23 nt, artificial
  Chemically synthesized
auacaaaaaaagaaacaaguuuc

SEQ ID NO: 40587 - RNA, 23 nt, artificial
  Chemically synthesized
uacaaaaaaagaaacaaguuucc

SEQ ID NO: 40588 - RNA, 23 nt, artificial
  Chemically synthesized
aggacuuuuuucuuuaauuacug

SEQ ID NO: 40589 - RNA, 23 nt, artificial
  Chemically synthesized
cagaacagauuucaucuccuuug

SEQ ID NO: 40590 - RNA, 23 nt, artificial
  Chemically synthesized
aaauaauuuuagcaaguggaaug

SEQ ID NO: 40591 - RNA, 23 nt, artificial
  Chemically synthesized
aauaauuuuagcaaguggaaugu

SEQ ID NO: 40592 - RNA, 23 nt, artificial
  Chemically synthesized
ggucucgauguuggagaugacgu

SEQ ID NO: 40593 - RNA, 23 nt, artificial
  Chemically synthesized
gucucgauguuggagaugacguc

SEQ ID NO: 40594 - RNA, 23 nt, artificial
  Chemically synthesized
caagugaaacaaacaaaacacga

SEQ ID NO: 40595 - RNA, 23 nt, artificial
  Chemically synthesized
aagugaaacaaacaaaacacgaa

SEQ ID NO: 40596 - RNA, 23 nt, artificial
  Chemically synthesized
agugaaacaaacaaaacacgaac

SEQ ID NO: 40597 - RNA, 23 nt, artificial
  Chemically synthesized
gugaaacaaacaaaacacgaaca

SEQ ID NO: 40598 - RNA, 23 nt, artificial
  Chemically synthesized
agcuuaccaaaugcuucucuaga

SEQ ID NO: 40599 - RNA, 23 nt, artificial
  Chemically synthesized
gcuuaccaaaugcuucucuagac

SEQ ID NO: 40600 - RNA, 23 nt, artificial
  Chemically synthesized
ggguaaugcgcuuggauagguca

SEQ ID NO: 40601 - RNA, 23 nt, artificial
  Chemically synthesized
gguaaugcgcuuggauaggucau

SEQ ID NO: 40602 - RNA, 23 nt, artificial
  Chemically synthesized
guaaugcgcuuggauaggucaug

SEQ ID NO: 40603 - RNA, 23 nt, artificial
  Chemically synthesized
cgaguugccuuuagcuuaaaugu

SEQ ID NO: 40604 - RNA, 23 nt, artificial
  Chemically synthesized
gaguugccuuuagcuuaaauguc

SEQ ID NO: 40605 - RNA, 23 nt, artificial
  Chemically synthesized
aguugccuuuagcuuaaaugucu

SEQ ID NO: 40606 - RNA, 23 nt, artificial
  Chemically synthesized
aauauauauaugauaaagcuuac

SEQ ID NO: 40607 - RNA, 23 nt, artificial
  Chemically synthesized
cauguaggugaagguggaguaga

SEQ ID NO: 40608 - RNA, 23 nt, artificial
  Chemically synthesized
gcacuaaaagagugcaaauguuu

SEQ ID NO: 40609 - RNA, 23 nt, artificial
  Chemically synthesized
cacuaaaagagugcaaauguuuc

SEQ ID NO: 40610 - RNA, 23 nt, artificial
  Chemically synthesized
acaaaaaaagaaacaaguuucca

SEQ ID NO: 40611 - RNA, 23 nt, artificial
  Chemically synthesized
caaaaaaagaaacaaguuuccag

SEQ ID NO: 40612 - RNA, 23 nt, artificial
  Chemically synthesized
aaaaaaagaaacaaguuuccagu

SEQ ID NO: 40613 - RNA, 23 nt, artificial
  Chemically synthesized
gugauacacuacauuugcaaucu

SEQ ID NO: 40614 - RNA, 23 nt, artificial
  Chemically synthesized
gauacacuacauuugcaaucucu

SEQ ID NO: 40615 - RNA, 23 nt, artificial
  Chemically synthesized
aaaagggauggacaaaaaggcau

SEQ ID NO: 40616 - RNA, 23 nt, artificial
  Chemically synthesized
aaagggauggacaaaaaggcauu

SEQ ID NO: 40617 - RNA, 23 nt, artificial
  Chemically synthesized
aagggauggacaaaaaggcauuu

SEQ ID NO: 40618 - RNA, 23 nt, artificial
  Chemically synthesized
aaaaaagaaacaaguuuccaguu

SEQ ID NO: 40619 - RNA, 23 nt, artificial
  Chemically synthesized
aaaaagaaacaaguuuccaguuu

SEQ ID NO: 40620 - RNA, 23 nt, artificial
  Chemically synthesized
augcuucucuagacuauuguuua

SEQ ID NO: 40621 - RNA, 23 nt, artificial
  Chemically synthesized
gcuucucuagacuauuguuuacu

SEQ ID NO: 40622 - RNA, 23 nt, artificial
  Chemically synthesized
gagaagauguagagaaauaugga

SEQ ID NO: 40623 - RNA, 23 nt, artificial
  Chemically synthesized
agaagauguagagaaauauggau

SEQ ID NO: 40624 - RNA, 23 nt, artificial
  Chemically synthesized
guaguuuagcuguuggaaaaaua

SEQ ID NO: 40625 - RNA, 23 nt, artificial
  Chemically synthesized
uaguuuagcuguuggaaaaauaa

SEQ ID NO: 40626 - RNA, 23 nt, artificial
  Chemically synthesized
aguuuagcuguuggaaaaauaag

SEQ ID NO: 40627 - RNA, 23 nt, artificial
  Chemically synthesized
guuuagcuguuggaaaaauaaga

SEQ ID NO: 40628 - RNA, 23 nt, artificial
  Chemically synthesized
gggaauucugguugguccucucu

SEQ ID NO: 40629 - RNA, 23 nt, artificial
  Chemically synthesized
aaaauaaauaauuuuagcaagug

SEQ ID NO: 40630 - RNA, 23 nt, artificial
  Chemically synthesized
aaauaaauaauuuuagcaagugg

SEQ ID NO: 40631 - RNA, 23 nt, artificial
  Chemically synthesized
aauaaauaauuuuagcaagugga

SEQ ID NO: 40632 - RNA, 23 nt, artificial
  Chemically synthesized
auaaauaauuuuagcaaguggaa

SEQ ID NO: 40633 - RNA, 23 nt, artificial
  Chemically synthesized
uaaauaauuuuagcaaguggaau

SEQ ID NO: 40634 - RNA, 23 nt, artificial
  Chemically synthesized
uaacugcugguguucugagaggc

SEQ ID NO: 40635 - RNA, 23 nt, artificial
  Chemically synthesized
cgcucucguucagaagucuccag

SEQ ID NO: 40636 - RNA, 23 nt, artificial
  Chemically synthesized
cuccucaaggucgagugagcugu

SEQ ID NO: 40637 - RNA, 23 nt, artificial
  Chemically synthesized
uccucaaggucgagugagcugug

SEQ ID NO: 40638 - RNA, 23 nt, artificial
  Chemically synthesized
ccucaaggucgagugagcugugu

SEQ ID NO: 40639 - RNA, 23 nt, artificial
  Chemically synthesized
cucaaggucgagugagcugugug

SEQ ID NO: 40640 - RNA, 23 nt, artificial
  Chemically synthesized
aaguuucacggagagaacaaaag

SEQ ID NO: 40641 - RNA, 23 nt, artificial
  Chemically synthesized
aguuucacggagagaacaaaagg

SEQ ID NO: 40642 - RNA, 23 nt, artificial
  Chemically synthesized
guuucacggagagaacaaaaggu

SEQ ID NO: 40643 - RNA, 23 nt, artificial
  Chemically synthesized
gaaugucuugaagguuaacugcu

SEQ ID NO: 40644 - RNA, 23 nt, artificial
  Chemically synthesized
aggaauacaaagaaacuugcuuu

SEQ ID NO: 40645 - RNA, 23 nt, artificial
  Chemically synthesized
ggaauacaaagaaacuugcuuuu

SEQ ID NO: 40646 - RNA, 23 nt, artificial
  Chemically synthesized
gaauacaaagaaacuugcuuuua

SEQ ID NO: 40647 - RNA, 23 nt, artificial
  Chemically synthesized
aauacaaagaaacuugcuuuuaa

SEQ ID NO: 40648 - RNA, 23 nt, artificial
  Chemically synthesized
auacaaagaaacuugcuuuuaau

SEQ ID NO: 40649 - RNA, 23 nt, artificial
  Chemically synthesized
caaguuuccaguuuguuuucaac

SEQ ID NO: 40650 - RNA, 23 nt, artificial
  Chemically synthesized
aaguaucuuuuuaaaaagaucug

SEQ ID NO: 40651 - RNA, 23 nt, artificial
  Chemically synthesized
gguguucugagaggcacagguga

SEQ ID NO: 40652 - RNA, 23 nt, artificial
  Chemically synthesized
guguucugagaggcacaggugac

SEQ ID NO: 40653 - RNA, 23 nt, artificial
  Chemically synthesized
uguucugagaggcacaggugaca

SEQ ID NO: 40654 - RNA, 23 nt, artificial
  Chemically synthesized
guucugagaggcacaggugacag

SEQ ID NO: 40655 - RNA, 23 nt, artificial
  Chemically synthesized
gaaaaaagggauggacaaaaagg

SEQ ID NO: 40656 - RNA, 23 nt, artificial
  Chemically synthesized
gcaaaucuguacaaaaauacucu

SEQ ID NO: 40657 - RNA, 23 nt, artificial
  Chemically synthesized
acuguucaacuaagaguaguuua

SEQ ID NO: 40658 - RNA, 23 nt, artificial
  Chemically synthesized
cuguucaacuaagaguaguuuag

SEQ ID NO: 40659 - RNA, 23 nt, artificial
  Chemically synthesized
guucaacuaagaguaguuuagcu

SEQ ID NO: 40660 - RNA, 23 nt, artificial
  Chemically synthesized
uagcacacugaucacacgauucu

SEQ ID NO: 40661 - RNA, 23 nt, artificial
  Chemically synthesized
uccaaagggaauucugguugguc

SEQ ID NO: 40662 - RNA, 23 nt, artificial
  Chemically synthesized
cugguguucugagaggcacaggu

SEQ ID NO: 40663 - RNA, 23 nt, artificial
  Chemically synthesized
ugguguucugagaggcacaggug

SEQ ID NO: 40664 - RNA, 23 nt, artificial
  Chemically synthesized
ucucuucuccuccugcaaagaaa

SEQ ID NO: 40665 - RNA, 23 nt, artificial
  Chemically synthesized
cucuucuccuccugcaaagaaaa

SEQ ID NO: 40666 - RNA, 23 nt, artificial
  Chemically synthesized
cuucuccuccugcaaagaaaagu

SEQ ID NO: 40667 - RNA, 23 nt, artificial
  Chemically synthesized
acaaagaaaaaagggauggacaa

SEQ ID NO: 40668 - RNA, 23 nt, artificial
  Chemically synthesized
caaagaaaaaagggauggacaaa

SEQ ID NO: 40669 - RNA, 23 nt, artificial
  Chemically synthesized
aaagaaaaaagggauggacaaaa

SEQ ID NO: 40670 - RNA, 23 nt, artificial
  Chemically synthesized
aagaaaaaagggauggacaaaaa

SEQ ID NO: 40671 - RNA, 23 nt, artificial
  Chemically synthesized
cugaagaggguuuaaaaagucca

SEQ ID NO: 40672 - RNA, 23 nt, artificial
  Chemically synthesized
ugaagaggguuuaaaaaguccag

SEQ ID NO: 40673 - RNA, 23 nt, artificial
  Chemically synthesized
gaagaggguuuaaaaaguccagu

SEQ ID NO: 40674 - RNA, 23 nt, artificial
  Chemically synthesized
uuguuuucaacaaaaacaacaaa

SEQ ID NO: 40675 - RNA, 23 nt, artificial
  Chemically synthesized
agcguccagucguagccuuugag

SEQ ID NO: 40676 - RNA, 23 nt, artificial
  Chemically synthesized
gcguccagucguagccuuugagc

SEQ ID NO: 40677 - RNA, 23 nt, artificial
  Chemically synthesized
cguccagucguagccuuugagca

SEQ ID NO: 40678 - RNA, 23 nt, artificial
  Chemically synthesized
guccagucguagccuuugagcac

SEQ ID NO: 40679 - RNA, 23 nt, artificial
  Chemically synthesized
uccagucguagccuuugagcacc

SEQ ID NO: 40680 - RNA, 23 nt, artificial
  Chemically synthesized
ggugaggaauacaaagaaacuug

SEQ ID NO: 40681 - RNA, 23 nt, artificial
  Chemically synthesized
gaggaauacaaagaaacuugcuu

SEQ ID NO: 40682 - RNA, 23 nt, artificial
  Chemically synthesized
agagagauuuagcacacugauca

SEQ ID NO: 40683 - RNA, 23 nt, artificial
  Chemically synthesized
gagagauuuagcacacugaucac

SEQ ID NO: 40684 - RNA, 23 nt, artificial
  Chemically synthesized
cagcuccuccuuaaaucgcaaag

SEQ ID NO: 40685 - RNA, 23 nt, artificial
  Chemically synthesized
gcuccuccuuaaaucgcaaagcc

SEQ ID NO: 40686 - RNA, 23 nt, artificial
  Chemically synthesized
gcagugugcucgggcacuuauug

SEQ ID NO: 40687 - RNA, 23 nt, artificial
  Chemically synthesized
cagugugcucgggcacuuauugg

SEQ ID NO: 40688 - RNA, 23 nt, artificial
  Chemically synthesized
agugugcucgggcacuuauuggc

SEQ ID NO: 40689 - RNA, 23 nt, artificial
  Chemically synthesized
gugugcucgggcacuuauuggcu

SEQ ID NO: 40690 - RNA, 23 nt, artificial
  Chemically synthesized
ugugcucgggcacuuauuggcug

SEQ ID NO: 40691 - RNA, 23 nt, artificial
  Chemically synthesized
uggcuguaguaggagcuggaguu

SEQ ID NO: 40692 - RNA, 23 nt, artificial
  Chemically synthesized
ggcuguaguaggagcuggaguuc

SEQ ID NO: 40693 - RNA, 23 nt, artificial
  Chemically synthesized
gcuguaguaggagcuggaguucu

SEQ ID NO: 40694 - RNA, 23 nt, artificial
  Chemically synthesized
cuguaguaggagcuggaguucug

SEQ ID NO: 40695 - RNA, 23 nt, artificial
  Chemically synthesized
uuucuuuaauuacugcuaaaaaa

SEQ ID NO: 40696 - RNA, 23 nt, artificial
  Chemically synthesized
ccccuucucuucuccuccugcaa

SEQ ID NO: 40697 - RNA, 23 nt, artificial
  Chemically synthesized
cccuucucuucuccuccugcaaa

SEQ ID NO: 40698 - RNA, 23 nt, artificial
  Chemically synthesized
ccuucucuucuccuccugcaaag

SEQ ID NO: 40699 - RNA, 23 nt, artificial
  Chemically synthesized
cuucucuucuccuccugcaaaga

SEQ ID NO: 40700 - RNA, 23 nt, artificial
  Chemically synthesized
guggucgguguagucguacugug

SEQ ID NO: 40701 - RNA, 23 nt, artificial
  Chemically synthesized
uggucgguguagucguacuguga

SEQ ID NO: 40702 - RNA, 23 nt, artificial
  Chemically synthesized
ggucgguguagucguacugugag

SEQ ID NO: 40703 - RNA, 23 nt, artificial
  Chemically synthesized
gucgguguagucguacugugagc

SEQ ID NO: 40704 - RNA, 23 nt, artificial
  Chemically synthesized
uccccucaaaaugguaaugaauc

SEQ ID NO: 40705 - RNA, 23 nt, artificial
  Chemically synthesized
ccccucaaaaugguaaugaauca

SEQ ID NO: 40706 - RNA, 23 nt, artificial
  Chemically synthesized
cccucaaaaugguaaugaaucau

SEQ ID NO: 40707 - RNA, 23 nt, artificial
  Chemically synthesized
ccucaaaaugguaaugaaucaua

SEQ ID NO: 40708 - RNA, 23 nt, artificial
  Chemically synthesized
aaccaaagcuuuuaccuaaagac

SEQ ID NO: 40709 - RNA, 23 nt, artificial
  Chemically synthesized
accaaagcuuuuaccuaaagaca

SEQ ID NO: 40710 - RNA, 23 nt, artificial
  Chemically synthesized
ccaaagcuuuuaccuaaagacaa

SEQ ID NO: 40711 - RNA, 23 nt, artificial
  Chemically synthesized
caaagcuuuuaccuaaagacaaa

SEQ ID NO: 40712 - RNA, 23 nt, artificial
  Chemically synthesized
aaagcuuuuaccuaaagacaaaa

SEQ ID NO: 40713 - RNA, 23 nt, artificial
  Chemically synthesized
uaaaaagcaauccucaaacucuc

SEQ ID NO: 40714 - RNA, 23 nt, artificial
  Chemically synthesized
aaaaagcaauccucaaacucucu

SEQ ID NO: 40715 - RNA, 23 nt, artificial
  Chemically synthesized
aaaagcaauccucaaacucucua

SEQ ID NO: 40716 - RNA, 23 nt, artificial
  Chemically synthesized
aacauucccagaacagauuucau

SEQ ID NO: 40717 - RNA, 23 nt, artificial
  Chemically synthesized
cucgcucucguucagaagucucc

SEQ ID NO: 40718 - RNA, 23 nt, artificial
  Chemically synthesized
aguuaagaacauaauuuaacaac

SEQ ID NO: 40719 - RNA, 23 nt, artificial
  Chemically synthesized
guuaagaacauaauuuaacaaca

SEQ ID NO: 40720 - RNA, 23 nt, artificial
  Chemically synthesized
uuaagaacauaauuuaacaacag

SEQ ID NO: 40721 - RNA, 23 nt, artificial
  Chemically synthesized
uaagaacauaauuuaacaacaga

SEQ ID NO: 40722 - RNA, 23 nt, artificial
  Chemically synthesized
aagaacauaauuuaacaacagau

SEQ ID NO: 40723 - RNA, 23 nt, artificial
  Chemically synthesized
gaaacaaacaaaacacgaacaca

SEQ ID NO: 40724 - RNA, 23 nt, artificial
  Chemically synthesized
acauuugcaaucucucauuuaua

SEQ ID NO: 40725 - RNA, 23 nt, artificial
  Chemically synthesized
cauuugcaaucucucauuuauac

SEQ ID NO: 40726 - RNA, 23 nt, artificial
  Chemically synthesized
auuugcaaucucucauuuauaca

SEQ ID NO: 40727 - RNA, 23 nt, artificial
  Chemically synthesized
uuugcaaucucucauuuauacaa

SEQ ID NO: 40728 - RNA, 23 nt, artificial
  Chemically synthesized
uugcaaucucucauuuauacaaa

SEQ ID NO: 40729 - RNA, 23 nt, artificial
  Chemically synthesized
ugguccucucuuucuucgguuau

SEQ ID NO: 40730 - RNA, 23 nt, artificial
  Chemically synthesized
aagguguuuuucucuucuuuaaa

SEQ ID NO: 40731 - RNA, 23 nt, artificial
  Chemically synthesized
agguguuuuucucuucuuuaaaa

SEQ ID NO: 40732 - RNA, 23 nt, artificial
  Chemically synthesized
gguguuuuucucuucuuuaaaaa

SEQ ID NO: 40733 - RNA, 23 nt, artificial
  Chemically synthesized
guguuuuucucuucuuuaaaaaa

SEQ ID NO: 40734 - RNA, 23 nt, artificial
  Chemically synthesized
uguuuuucucuucuuuaaaaaau

SEQ ID NO: 40735 - RNA, 23 nt, artificial
  Chemically synthesized
gaccauacccuuugaggaaagcu

SEQ ID NO: 40736 - RNA, 23 nt, artificial
  Chemically synthesized
cgcuucucgcucucguucagaag

SEQ ID NO: 40737 - RNA, 23 nt, artificial
  Chemically synthesized
gcuucucgcucucguucagaagu

SEQ ID NO: 40738 - RNA, 23 nt, artificial
  Chemically synthesized
cuucucgcucucguucagaaguc

SEQ ID NO: 40739 - RNA, 23 nt, artificial
  Chemically synthesized
ugguuacaguuaagaacauaauu

SEQ ID NO: 40740 - RNA, 23 nt, artificial
  Chemically synthesized
gguuacaguuaagaacauaauuu

SEQ ID NO: 40741 - RNA, 23 nt, artificial
  Chemically synthesized
guuacaguuaagaacauaauuua

SEQ ID NO: 40742 - RNA, 23 nt, artificial
  Chemically synthesized
uuacaguuaagaacauaauuuaa

SEQ ID NO: 40743 - RNA, 23 nt, artificial
  Chemically synthesized
uacaguuaagaacauaauuuaac

SEQ ID NO: 40744 - RNA, 23 nt, artificial
  Chemically synthesized
uaccaaaugcuucucuagacuau

SEQ ID NO: 40745 - RNA, 23 nt, artificial
  Chemically synthesized
guaauccgggugguccuucuugu

SEQ ID NO: 40746 - RNA, 23 nt, artificial
  Chemically synthesized
ggggaggaaaaagagcaaaagug

SEQ ID NO: 40747 - RNA, 23 nt, artificial
  Chemically synthesized
gggaggaaaaagagcaaaagugg

SEQ ID NO: 40748 - RNA, 23 nt, artificial
  Chemically synthesized
ggaggaaaaagagcaaaaguggg

SEQ ID NO: 40749 - RNA, 23 nt, artificial
  Chemically synthesized
gaggaaaaagagcaaaagugggg

SEQ ID NO: 40750 - RNA, 23 nt, artificial
  Chemically synthesized
aggaaaaagagcaaaaguggggg

SEQ ID NO: 40751 - RNA, 23 nt, artificial
  Chemically synthesized
aaguuacagaaguaucuuuuuaa

SEQ ID NO: 40752 - RNA, 23 nt, artificial
  Chemically synthesized
aguuacagaaguaucuuuuuaaa

SEQ ID NO: 40753 - RNA, 23 nt, artificial
  Chemically synthesized
guuacagaaguaucuuuuuaaaa

SEQ ID NO: 40754 - RNA, 23 nt, artificial
  Chemically synthesized
uuacagaaguaucuuuuuaaaaa

SEQ ID NO: 40755 - RNA, 23 nt, artificial
  Chemically synthesized
uacagaaguaucuuuuuaaaaag

SEQ ID NO: 40756 - RNA, 23 nt, artificial
  Chemically synthesized
agcuguuggaaaaauaagagcau

SEQ ID NO: 40757 - RNA, 23 nt, artificial
  Chemically synthesized
gcuguuggaaaaauaagagcauu

SEQ ID NO: 40758 - RNA, 23 nt, artificial
  Chemically synthesized
cuguuggaaaaauaagagcauuu

SEQ ID NO: 40759 - RNA, 23 nt, artificial
  Chemically synthesized
uguuggaaaaauaagagcauuua

SEQ ID NO: 40760 - RNA, 23 nt, artificial
  Chemically synthesized
uuuaaaaagcaauccucaaacuc

SEQ ID NO: 40761 - RNA, 23 nt, artificial
  Chemically synthesized
uuaaaaagcaauccucaaacucu

SEQ ID NO: 40762 - RNA, 23 nt, artificial
  Chemically synthesized
ucccagcagcaccguuuuaaggc

SEQ ID NO: 40763 - RNA, 23 nt, artificial
  Chemically synthesized
cccagcagcaccguuuuaaggcu

SEQ ID NO: 40764 - RNA, 23 nt, artificial
  Chemically synthesized
ccagcagcaccguuuuaaggcuc

SEQ ID NO: 40765 - RNA, 23 nt, artificial
  Chemically synthesized
cagcagcaccguuuuaaggcuca

SEQ ID NO: 40766 - RNA, 23 nt, artificial
  Chemically synthesized
agcagcaccguuuuaaggcucaa

SEQ ID NO: 40767 - RNA, 23 nt, artificial
  Chemically synthesized
aaacucguugacaucgaaggucu

SEQ ID NO: 40768 - RNA, 23 nt, artificial
  Chemically synthesized
acucguugacaucgaaggucucg

SEQ ID NO: 40769 - RNA, 23 nt, artificial
  Chemically synthesized
guguguagacggguuguucccag

SEQ ID NO: 40770 - RNA, 23 nt, artificial
  Chemically synthesized
guguagacggguuguucccagug

SEQ ID NO: 40771 - RNA, 23 nt, artificial
  Chemically synthesized
uguagacggguuguucccagugc

SEQ ID NO: 40772 - RNA, 23 nt, artificial
  Chemically synthesized
aagacaaaauaugauuuaaaugc

SEQ ID NO: 40773 - RNA, 23 nt, artificial
  Chemically synthesized
agacaaaauaugauuuaaaugcc

SEQ ID NO: 40774 - RNA, 23 nt, artificial
  Chemically synthesized
gacaaaauaugauuuaaaugcca

SEQ ID NO: 40775 - RNA, 23 nt, artificial
  Chemically synthesized
acaaaauaugauuuaaaugccag

SEQ ID NO: 40776 - RNA, 23 nt, artificial
  Chemically synthesized
caaaauaugauuuaaaugccagg

SEQ ID NO: 40777 - RNA, 23 nt, artificial
  Chemically synthesized
cugguuacaguuaagaacauaau

SEQ ID NO: 40778 - RNA, 23 nt, artificial
  Chemically synthesized
aacauaauuuaacaacagaugac

SEQ ID NO: 40779 - RNA, 23 nt, artificial
  Chemically synthesized
caaguggguaaugcgcuuggaua

SEQ ID NO: 40780 - RNA, 23 nt, artificial
  Chemically synthesized
aaguggguaaugcgcuuggauag

SEQ ID NO: 40781 - RNA, 23 nt, artificial
  Chemically synthesized
aguggguaaugcgcuuggauagg

SEQ ID NO: 40782 - RNA, 23 nt, artificial
  Chemically synthesized
guggguaaugcgcuuggauaggu

SEQ ID NO: 40783 - RNA, 23 nt, artificial
  Chemically synthesized
agccugaggaauuaagcaaaguu

SEQ ID NO: 40784 - RNA, 23 nt, artificial
  Chemically synthesized
gccugaggaauuaagcaaaguua

SEQ ID NO: 40785 - RNA, 23 nt, artificial
  Chemically synthesized
ccugaggaauuaagcaaaguuaa

SEQ ID NO: 40786 - RNA, 23 nt, artificial
  Chemically synthesized
cugaggaauuaagcaaaguuaac

SEQ ID NO: 40787 - RNA, 23 nt, artificial
  Chemically synthesized
aaagcuuaccaaaugcuucucua

SEQ ID NO: 40788 - RNA, 23 nt, artificial
  Chemically synthesized
agaaacaaguuuccaguuuguuu

SEQ ID NO: 40789 - RNA, 23 nt, artificial
  Chemically synthesized
gaaacaaguuuccaguuuguuuu

SEQ ID NO: 40790 - RNA, 23 nt, artificial
  Chemically synthesized
aaacaaguuuccaguuuguuuuc

SEQ ID NO: 40791 - RNA, 23 nt, artificial
  Chemically synthesized
cugcugguguucugagaggcaca

SEQ ID NO: 40792 - RNA, 23 nt, artificial
  Chemically synthesized
ugcugguguucugagaggcacag

SEQ ID NO: 40793 - RNA, 23 nt, artificial
  Chemically synthesized
gcugguguucugagaggcacagg

SEQ ID NO: 40794 - RNA, 23 nt, artificial
  Chemically synthesized
uguucuugcuggagccguugacg

SEQ ID NO: 40795 - RNA, 23 nt, artificial
  Chemically synthesized
guucuugcuggagccguugacgc

SEQ ID NO: 40796 - RNA, 23 nt, artificial
  Chemically synthesized
uucuugcuggagccguugacgcg

SEQ ID NO: 40797 - RNA, 23 nt, artificial
  Chemically synthesized
cuaaaaaaauaauuacaaagucc

SEQ ID NO: 40798 - RNA, 23 nt, artificial
  Chemically synthesized
uaaaaaaauaauuacaaagucca

SEQ ID NO: 40799 - RNA, 23 nt, artificial
  Chemically synthesized
aaaaaaauaauuacaaaguccaa

SEQ ID NO: 40800 - RNA, 23 nt, artificial
  Chemically synthesized
aaaaaauaauuacaaaguccaaa

SEQ ID NO: 40801 - RNA, 23 nt, artificial
  Chemically synthesized
cacaugcuugcauuguuuuugug

SEQ ID NO: 40802 - RNA, 23 nt, artificial
  Chemically synthesized
acaugcuugcauuguuuuugugu

SEQ ID NO: 40803 - RNA, 23 nt, artificial
  Chemically synthesized
caugcuugcauuguuuuuguguc

SEQ ID NO: 40804 - RNA, 23 nt, artificial
  Chemically synthesized
gacucagugauacacuacauuug

SEQ ID NO: 40805 - RNA, 23 nt, artificial
  Chemically synthesized
guagagaaauauggaugacacau

SEQ ID NO: 40806 - RNA, 23 nt, artificial
  Chemically synthesized
ccacaccaugaaggcguucaugg

SEQ ID NO: 40807 - RNA, 23 nt, artificial
  Chemically synthesized
cacaccaugaaggcguucauggg

SEQ ID NO: 40808 - RNA, 23 nt, artificial
  Chemically synthesized
acaccaugaaggcguucaugggc

SEQ ID NO: 40809 - RNA, 23 nt, artificial
  Chemically synthesized
caccaugaaggcguucaugggcc

SEQ ID NO: 40810 - RNA, 23 nt, artificial
  Chemically synthesized
accaugaaggcguucaugggccg

SEQ ID NO: 40811 - RNA, 23 nt, artificial
  Chemically synthesized
gcugguacuuguaauccgggugg

SEQ ID NO: 40812 - RNA, 23 nt, artificial
  Chemically synthesized
cugguacuuguaauccggguggu

SEQ ID NO: 40813 - RNA, 23 nt, artificial
  Chemically synthesized
gguacuuguaauccggguggucc

SEQ ID NO: 40814 - RNA, 23 nt, artificial
  Chemically synthesized
uuuguaagagaaagcaaaucugu

SEQ ID NO: 40815 - RNA, 23 nt, artificial
  Chemically synthesized
uuguaagagaaagcaaaucugua

SEQ ID NO: 40816 - RNA, 23 nt, artificial
  Chemically synthesized
uguaagagaaagcaaaucuguac

SEQ ID NO: 40817 - RNA, 23 nt, artificial
  Chemically synthesized
guaagagaaagcaaaucuguaca

SEQ ID NO: 40818 - RNA, 23 nt, artificial
  Chemically synthesized
caaaaacaacaaagaaaaaaggg

SEQ ID NO: 40819 - RNA, 23 nt, artificial
  Chemically synthesized
aaaaacaacaaagaaaaaaggga

SEQ ID NO: 40820 - RNA, 23 nt, artificial
  Chemically synthesized
aaaacaacaaagaaaaaagggau

SEQ ID NO: 40821 - RNA, 23 nt, artificial
  Chemically synthesized
aaacaacaaagaaaaaagggaug

SEQ ID NO: 40822 - RNA, 23 nt, artificial
  Chemically synthesized
aacaacaaagaaaaaagggaugg

SEQ ID NO: 40823 - RNA, 23 nt, artificial
  Chemically synthesized
uaauugcaaaauaaggccuuuau

SEQ ID NO: 40824 - RNA, 23 nt, artificial
  Chemically synthesized
uuaaaaagaucugcuuuuauaca

SEQ ID NO: 40825 - RNA, 23 nt, artificial
  Chemically synthesized
uaaaaagaucugcuuuuauacag

SEQ ID NO: 40826 - RNA, 23 nt, artificial
  Chemically synthesized
aaaaagaucugcuuuuauacaga

SEQ ID NO: 40827 - RNA, 23 nt, artificial
  Chemically synthesized
aaaagaucugcuuuuauacagaa

SEQ ID NO: 40828 - RNA, 23 nt, artificial
  Chemically synthesized
gaaaagcuagggcacacuguuca

SEQ ID NO: 40829 - RNA, 23 nt, artificial
  Chemically synthesized
gacuauuguuuacucccauaauu

SEQ ID NO: 40830 - RNA, 23 nt, artificial
  Chemically synthesized
caaaugacucagugauacacuac

SEQ ID NO: 40831 - RNA, 23 nt, artificial
  Chemically synthesized
aaaugacucagugauacacuaca

SEQ ID NO: 40832 - RNA, 23 nt, artificial
  Chemically synthesized
aaugacucagugauacacuacau

SEQ ID NO: 40833 - RNA, 23 nt, artificial
  Chemically synthesized
aagcuuuuaccuaaagacaaaau

SEQ ID NO: 40834 - RNA, 23 nt, artificial
  Chemically synthesized
uuagcuguuggaaaaauaagagc

SEQ ID NO: 40835 - RNA, 23 nt, artificial
  Chemically synthesized
gugucuuggaaauuuggguacga

SEQ ID NO: 40836 - RNA, 23 nt, artificial
  Chemically synthesized
uaaguuacagaaguaucuuuuua

SEQ ID NO: 40837 - RNA, 23 nt, artificial
  Chemically synthesized
cggcugguacuuguaauccgggu

SEQ ID NO: 40838 - RNA, 23 nt, artificial
  Chemically synthesized
ggcugguacuuguaauccgggug

SEQ ID NO: 40839 - RNA, 23 nt, artificial
  Chemically synthesized
gucaaacucguugacaucgaagg

SEQ ID NO: 40840 - RNA, 23 nt, artificial
  Chemically synthesized
caaacucguugacaucgaagguc

SEQ ID NO: 40841 - RNA, 23 nt, artificial
  Chemically synthesized
ccgcuucucgcucucguucagaa

SEQ ID NO: 40842 - RNA, 23 nt, artificial
  Chemically synthesized
aggccuuuauuuuuuuuuaaggc

SEQ ID NO: 40843 - RNA, 23 nt, artificial
  Chemically synthesized
ggccuuuauuuuuuuuuaaggca

SEQ ID NO: 40844 - RNA, 23 nt, artificial
  Chemically synthesized
auuuauacaaaaaaagaaacaag

SEQ ID NO: 40845 - RNA, 23 nt, artificial
  Chemically synthesized
aaaaguccaguuucucguugauu

SEQ ID NO: 40846 - RNA, 23 nt, artificial
  Chemically synthesized
acaaaucuagggugaggaauaca

SEQ ID NO: 40847 - RNA, 23 nt, artificial
  Chemically synthesized
guaguaggagcuggaguucuggu

SEQ ID NO: 40848 - RNA, 23 nt, artificial
  Chemically synthesized
aguaggagcuggaguucuggugg

SEQ ID NO: 40849 - RNA, 23 nt, artificial
  Chemically synthesized
guaggagcuggaguucugguggu

SEQ ID NO: 40850 - RNA, 23 nt, artificial
  Chemically synthesized
uaggagcuggaguucuggugguc

SEQ ID NO: 40851 - RNA, 23 nt, artificial
  Chemically synthesized
cugaucacacgauucuccaucau

SEQ ID NO: 40852 - RNA, 23 nt, artificial
  Chemically synthesized
ugaucacacgauucuccaucauc

SEQ ID NO: 40853 - RNA, 23 nt, artificial
  Chemically synthesized
cgcaaagccugaggaauuaagca

SEQ ID NO: 40854 - RNA, 23 nt, artificial
  Chemically synthesized
gcaaagccugaggaauuaagcaa

SEQ ID NO: 40855 - RNA, 23 nt, artificial
  Chemically synthesized
caaagccugaggaauuaagcaaa

SEQ ID NO: 40856 - RNA, 23 nt, artificial
  Chemically synthesized
aaagaaacaaguuuccaguuugu

SEQ ID NO: 40857 - RNA, 23 nt, artificial
  Chemically synthesized
acaguuaagaacauaauuuaaca

SEQ ID NO: 40858 - RNA, 23 nt, artificial
  Chemically synthesized
gcccguucuucaccgacuuccuc

SEQ ID NO: 40859 - RNA, 23 nt, artificial
  Chemically synthesized
aaagaucugcuuuuauacagaaa

SEQ ID NO: 40860 - RNA, 23 nt, artificial
  Chemically synthesized
aagaucugcuuuuauacagaaau

SEQ ID NO: 40861 - RNA, 23 nt, artificial
  Chemically synthesized
ucgcucuccuucuucagaucggg

SEQ ID NO: 40862 - RNA, 23 nt, artificial
  Chemically synthesized
cgcucuccuucuucagaucgggc

SEQ ID NO: 40863 - RNA, 23 nt, artificial
  Chemically synthesized
agagaauauuccucacagaggac

SEQ ID NO: 40864 - RNA, 23 nt, artificial
  Chemically synthesized
gagaauauuccucacagaggacu

SEQ ID NO: 40865 - RNA, 23 nt, artificial
  Chemically synthesized
agaauauuccucacagaggacuu

SEQ ID NO: 40866 - RNA, 23 nt, artificial
  Chemically synthesized
ggucaaacucguugacaucgaag

SEQ ID NO: 40867 - RNA, 23 nt, artificial
  Chemically synthesized
aaagggaaagguaaguuucacgg

SEQ ID NO: 40868 - RNA, 23 nt, artificial
  Chemically synthesized
aagggaaagguaaguuucacgga

SEQ ID NO: 40869 - RNA, 23 nt, artificial
  Chemically synthesized
agggaaagguaaguuucacggag

SEQ ID NO: 40870 - RNA, 23 nt, artificial
  Chemically synthesized
gaauauuccucacagaggacuuu

SEQ ID NO: 40871 - RNA, 23 nt, artificial
  Chemically synthesized
ccacaaguggguaaugcgcuugg

SEQ ID NO: 40872 - RNA, 23 nt, artificial
  Chemically synthesized
cacaaguggguaaugcgcuugga

SEQ ID NO: 40873 - RNA, 23 nt, artificial
  Chemically synthesized
acaaguggguaaugcgcuuggau

SEQ ID NO: 40874 - RNA, 23 nt, artificial
  Chemically synthesized
caacagaugaccauacccuuuga

SEQ ID NO: 40875 - RNA, 23 nt, artificial
  Chemically synthesized
ccagaacagauuucaucuccuuu

SEQ ID NO: 40876 - RNA, 23 nt, artificial
  Chemically synthesized
caaaugcuucucuagacuauugu

SEQ ID NO: 40877 - RNA, 23 nt, artificial
  Chemically synthesized
caacaaagaaaaaagggauggac

SEQ ID NO: 40878 - RNA, 23 nt, artificial
  Chemically synthesized
aaggcucaagguguuuuucucuu

SEQ ID NO: 40879 - RNA, 23 nt, artificial
  Chemically synthesized
aaaagggaaagguaaguuucacg

SEQ ID NO: 40880 - RNA, 23 nt, artificial
  Chemically synthesized
aauaagagcauuuaauuuuaucu

SEQ ID NO: 40881 - RNA, 23 nt, artificial
  Chemically synthesized
auaagagcauuuaauuuuaucua

SEQ ID NO: 40882 - RNA, 23 nt, artificial
  Chemically synthesized
uaagagcauuuaauuuuaucuaa

SEQ ID NO: 40883 - RNA, 23 nt, artificial
  Chemically synthesized
aagagcauuuaauuuuaucuaaa

SEQ ID NO: 40884 - RNA, 23 nt, artificial
  Chemically synthesized
agagcauuuaauuuuaucuaaaa

SEQ ID NO: 40885 - RNA, 23 nt, artificial
  Chemically synthesized
cgcuuggauaggucauguuugug

SEQ ID NO: 40886 - RNA, 23 nt, artificial
  Chemically synthesized
gcuuggauaggucauguuugugu

SEQ ID NO: 40887 - RNA, 23 nt, artificial
  Chemically synthesized
cuuggauaggucauguuuguguc

SEQ ID NO: 40888 - RNA, 23 nt, artificial
  Chemically synthesized
uggauaggucauguuugugucuu

SEQ ID NO: 40889 - RNA, 23 nt, artificial
  Chemically synthesized
uaaaugucuuuaaggaagaagaa

SEQ ID NO: 40890 - RNA, 23 nt, artificial
  Chemically synthesized
aaaugucuuuaaggaagaagaag

SEQ ID NO: 40891 - RNA, 23 nt, artificial
  Chemically synthesized
cgggugguccuucuugugcugca

SEQ ID NO: 40892 - RNA, 23 nt, artificial
  Chemically synthesized
gggugguccuucuugugcugcac

SEQ ID NO: 40893 - RNA, 23 nt, artificial
  Chemically synthesized
ggugguccuucuugugcugcacg

SEQ ID NO: 40894 - RNA, 23 nt, artificial
  Chemically synthesized
gugguccuucuugugcugcacgc

SEQ ID NO: 40895 - RNA, 23 nt, artificial
  Chemically synthesized
ugguccuucuugugcugcacgcg

SEQ ID NO: 40896 - RNA, 23 nt, artificial
  Chemically synthesized
gcaaaugacucagugauacacua

SEQ ID NO: 40897 - RNA, 23 nt, artificial
  Chemically synthesized
cuggucaaacucguugacaucga

SEQ ID NO: 40898 - RNA, 23 nt, artificial
  Chemically synthesized
uggucaaacucguugacaucgaa

SEQ ID NO: 40899 - RNA, 23 nt, artificial
  Chemically synthesized
caucuccuuugcuugccuuuuac

SEQ ID NO: 40900 - RNA, 23 nt, artificial
  Chemically synthesized
aacugcugguguucugagaggca

SEQ ID NO: 40901 - RNA, 23 nt, artificial
  Chemically synthesized
acugcugguguucugagaggcac

SEQ ID NO: 40902 - RNA, 23 nt, artificial
  Chemically synthesized
ggcuguagugugggagguugaag

SEQ ID NO: 40903 - RNA, 23 nt, artificial
  Chemically synthesized
ggcagagagauuuagcacacuga

SEQ ID NO: 40904 - RNA, 23 nt, artificial
  Chemically synthesized
gcagagagauuuagcacacugau

SEQ ID NO: 40905 - RNA, 23 nt, artificial
  Chemically synthesized
cagagagauuuagcacacugauc

SEQ ID NO: 40906 - RNA, 23 nt, artificial
  Chemically synthesized
aaauaagagcauuuaauuuuauc

SEQ ID NO: 40907 - RNA, 23 nt, artificial
  Chemically synthesized
gguaaguuucacggagagaacaa

SEQ ID NO: 40908 - RNA, 23 nt, artificial
  Chemically synthesized
guaaguuucacggagagaacaaa

SEQ ID NO: 40909 - RNA, 23 nt, artificial
  Chemically synthesized
aacaaaaacaacaaagaaaaaag

SEQ ID NO: 40910 - RNA, 23 nt, artificial
  Chemically synthesized
acaaaaacaacaaagaaaaaagg

SEQ ID NO: 40911 - RNA, 23 nt, artificial
  Chemically synthesized
gccacugaaguuuccagucaguu

SEQ ID NO: 40912 - RNA, 23 nt, artificial
  Chemically synthesized
aaaauaugauuuaaaugccaggu

SEQ ID NO: 40913 - RNA, 23 nt, artificial
  Chemically synthesized
gcagaaaacacugcaaaugacuc

SEQ ID NO: 40914 - RNA, 23 nt, artificial
  Chemically synthesized
cagaaaacacugcaaaugacuca

SEQ ID NO: 40915 - RNA, 23 nt, artificial
  Chemically synthesized
agaaaacacugcaaaugacucag

SEQ ID NO: 40916 - RNA, 23 nt, artificial
  Chemically synthesized
gaaaacacugcaaaugacucagu

SEQ ID NO: 40917 - RNA, 23 nt, artificial
  Chemically synthesized
cacaaaccaaagcuuuuaccuaa

SEQ ID NO: 40918 - RNA, 23 nt, artificial
  Chemically synthesized
acaaaccaaagcuuuuaccuaaa

SEQ ID NO: 40919 - RNA, 23 nt, artificial
  Chemically synthesized
guccucucuuucuucgguuauuu

SEQ ID NO: 40920 - RNA, 23 nt, artificial
  Chemically synthesized
gcaaaauaaggccuuuauuuuuu

SEQ ID NO: 40921 - RNA, 23 nt, artificial
  Chemically synthesized
caaaauaaggccuuuauuuuuuu

SEQ ID NO: 40922 - RNA, 23 nt, artificial
  Chemically synthesized
aaaauaaggccuuuauuuuuuuu

SEQ ID NO: 40923 - RNA, 23 nt, artificial
  Chemically synthesized
aaauaaggccuuuauuuuuuuuu

SEQ ID NO: 40924 - RNA, 23 nt, artificial
  Chemically synthesized
aauaaggccuuuauuuuuuuuua

SEQ ID NO: 40925 - RNA, 23 nt, artificial
  Chemically synthesized
cuccucgcucuccuucuucagau

SEQ ID NO: 40926 - RNA, 23 nt, artificial
  Chemically synthesized
ccucgcucuccuucuucagaucg

SEQ ID NO: 40927 - RNA, 23 nt, artificial
  Chemically synthesized
cucgcucuccuucuucagaucgg

SEQ ID NO: 40928 - RNA, 23 nt, artificial
  Chemically synthesized
uuagcuuaaaugucuuuaaggaa

SEQ ID NO: 40929 - RNA, 23 nt, artificial
  Chemically synthesized
uucuuuaauuacugcuaaaaaaa

SEQ ID NO: 40930 - RNA, 23 nt, artificial
  Chemically synthesized
ucuuuaauuacugcuaaaaaaau

SEQ ID NO: 40931 - RNA, 23 nt, artificial
  Chemically synthesized
gcgcuuggauaggucauguuugu

SEQ ID NO: 40932 - RNA, 23 nt, artificial
  Chemically synthesized
cagugauacacuacauuugcaau

SEQ ID NO: 40933 - RNA, 23 nt, artificial
  Chemically synthesized
uacaaagaaacuugcuuuuaaua

SEQ ID NO: 40934 - RNA, 23 nt, artificial
  Chemically synthesized
guuggaaaaauaagagcauuuaa

SEQ ID NO: 40935 - RNA, 23 nt, artificial
  Chemically synthesized
uuggaaaaauaagagcauuuaau

SEQ ID NO: 40936 - RNA, 23 nt, artificial
  Chemically synthesized
uggaaaaauaagagcauuuaauu

SEQ ID NO: 40937 - RNA, 23 nt, artificial
  Chemically synthesized
agaggguuuaaaaaguccaguuu

SEQ ID NO: 40938 - RNA, 23 nt, artificial
  Chemically synthesized
aggucucgauguuggagaugacg

SEQ ID NO: 40939 - RNA, 23 nt, artificial
  Chemically synthesized
gaacauaauuuaacaacagauga

SEQ ID NO: 40940 - RNA, 23 nt, artificial
  Chemically synthesized
aauugcaaaauaaggccuuuauu

SEQ ID NO: 40941 - RNA, 23 nt, artificial
  Chemically synthesized
auugcaaaauaaggccuuuauuu

SEQ ID NO: 40942 - RNA, 23 nt, artificial
  Chemically synthesized
uugcaaaauaaggccuuuauuuu

SEQ ID NO: 40943 - RNA, 23 nt, artificial
  Chemically synthesized
ugcaaucucucauuuauacaaaa

SEQ ID NO: 40944 - RNA, 23 nt, artificial
  Chemically synthesized
aaccucuccuuacaaaauaaaua

SEQ ID NO: 40945 - RNA, 23 nt, artificial
  Chemically synthesized
accucuccuuacaaaauaaauaa

SEQ ID NO: 40946 - RNA, 23 nt, artificial
  Chemically synthesized
ccucuccuuacaaaauaaauaau

SEQ ID NO: 40947 - RNA, 23 nt, artificial
  Chemically synthesized
cucuccuuacaaaauaaauaauu

SEQ ID NO: 40948 - RNA, 23 nt, artificial
  Chemically synthesized
ucuccuuacaaaauaaauaauuu

SEQ ID NO: 40949 - RNA, 23 nt, artificial
  Chemically synthesized
guggaaugucuugaagguuaacu

SEQ ID NO: 40950 - RNA, 23 nt, artificial
  Chemically synthesized
acacuguucaacuaagaguaguu

SEQ ID NO: 40951 - RNA, 23 nt, artificial
  Chemically synthesized
cacuguucaacuaagaguaguuu

SEQ ID NO: 40952 - RNA, 23 nt, artificial
  Chemically synthesized
ucagaagucuccagagcuugccc

SEQ ID NO: 40953 - RNA, 23 nt, artificial
  Chemically synthesized
agagugcaaauguuucccagcag

SEQ ID NO: 40954 - RNA, 23 nt, artificial
  Chemically synthesized
gagugcaaauguuucccagcagc

SEQ ID NO: 40955 - RNA, 23 nt, artificial
  Chemically synthesized
agugcaaauguuucccagcagca

SEQ ID NO: 40956 - RNA, 23 nt, artificial
  Chemically synthesized
gugcaaauguuucccagcagcac

SEQ ID NO: 40957 - RNA, 23 nt, artificial
  Chemically synthesized
agacuauuguuuacucccauaau

SEQ ID NO: 40958 - RNA, 23 nt, artificial
  Chemically synthesized
uggcugcugaaacauucccagaa

SEQ ID NO: 40959 - RNA, 23 nt, artificial
  Chemically synthesized
ggcugcugaaacauucccagaac

SEQ ID NO: 40960 - RNA, 23 nt, artificial
  Chemically synthesized
gcugcugaaacauucccagaaca

SEQ ID NO: 40961 - RNA, 23 nt, artificial
  Chemically synthesized
aaacacugcaaaugacucaguga

SEQ ID NO: 40962 - RNA, 23 nt, artificial
  Chemically synthesized
aacacugcaaaugacucagugau

SEQ ID NO: 40963 - RNA, 23 nt, artificial
  Chemically synthesized
caaacaggcagagagauuuagca

SEQ ID NO: 40964 - RNA, 23 nt, artificial
  Chemically synthesized
aacaggcagagagauuuagcaca

SEQ ID NO: 40965 - RNA, 23 nt, artificial
  Chemically synthesized
gaagguuaacugcugguguucug

SEQ ID NO: 40966 - RNA, 23 nt, artificial
  Chemically synthesized
guggcuguaguaggagcuggagu

SEQ ID NO: 40967 - RNA, 23 nt, artificial
  Chemically synthesized
agggguccaggagauucauacgc

SEQ ID NO: 40968 - RNA, 23 nt, artificial
  Chemically synthesized
agaacauaauuuaacaacagaug

SEQ ID NO: 40969 - RNA, 23 nt, artificial
  Chemically synthesized
cgaaggucucgauguuggagaug

SEQ ID NO: 40970 - RNA, 23 nt, artificial
  Chemically synthesized
gaaggucucgauguuggagauga

SEQ ID NO: 40971 - RNA, 23 nt, artificial
  Chemically synthesized
aaggucucgauguuggagaugac

SEQ ID NO: 40972 - RNA, 23 nt, Artificial
  Chemically synthesized
gcggcugguacuuguaauccggg

SEQ ID NO: 40973 - RNA, 19 nt, artificial
  Chemically synthesized
ccgaggugcucaagaacua

SEQ ID NO: 40974 - RNA, 19 nt, artificial
  Chemically synthesized
ggauccaccacaaguacaa

SEQ ID NO: 40975 - RNA, 19 nt, artificial
  Chemically synthesized
cagcugacauggaaauaca

SEQ ID NO: 40976 - RNA, 19 nt, artificial
  Chemically synthesized
gcuggauccaccacaagua

SEQ ID NO: 40977 - RNA, 19 nt, artificial
  Chemically synthesized
acaaccugaugcagcagaa

SEQ ID NO: 40978 - RNA, 19 nt, artificial
  Chemically synthesized
ggcacagacuccaaguauu

SEQ ID NO: 40979 - RNA, 19 nt, artificial
  Chemically synthesized
gcacagacuccaaguauua

SEQ ID NO: 40980 - RNA, 19 nt, artificial
  Chemically synthesized
acauggacgcccaguacua

SEQ ID NO: 40981 - RNA, 19 nt, artificial
  Chemically synthesized
aaugguaccucguuugaca

SEQ ID NO: 40982 - RNA, 19 nt, artificial
  Chemically synthesized
uucccgaggugcucaagaa

SEQ ID NO: 40983 - RNA, 19 nt, artificial
  Chemically synthesized
gcaucuccgucaacaacgu

SEQ ID NO: 40984 - RNA, 19 nt, artificial
  Chemically synthesized
acauggaaauacaguuguu

SEQ ID NO: 40985 - RNA, 19 nt, artificial
  Chemically synthesized
guaccucguuugacaucca

SEQ ID NO: 40986 - RNA, 19 nt, artificial
  Chemically synthesized
gcuguuuuguucugugguu

SEQ ID NO: 40987 - RNA, 19 nt, artificial
  Chemically synthesized
gaagaaugguaccucguuu

SEQ ID NO: 40988 - RNA, 19 nt, artificial
  Chemically synthesized
agagcugauccagagcaca

SEQ ID NO: 40989 - RNA, 19 nt, artificial
  Chemically synthesized
cacccuaccuguucagugu

SEQ ID NO: 40990 - RNA, 19 nt, artificial
  Chemically synthesized
gcaccuacgugaagaaugg

SEQ ID NO: 40991 - RNA, 19 nt, artificial
  Chemically synthesized
aucuguuucgugcauugga

SEQ ID NO: 40992 - RNA, 19 nt, artificial
  Chemically synthesized
agaaugguaccucguuuga

SEQ ID NO: 40993 - RNA, 19 nt, artificial
  Chemically synthesized
ugaagaaugguaccucguu

SEQ ID NO: 40994 - RNA, 19 nt, artificial
  Chemically synthesized
cguuugacauccacuaugg

SEQ ID NO: 40995 - RNA, 19 nt, artificial
  Chemically synthesized
gaacaucuucuccuucuac

SEQ ID NO: 40996 - RNA, 19 nt, artificial
  Chemically synthesized
ugacauggaaauacaguug

SEQ ID NO: 40997 - RNA, 19 nt, artificial
  Chemically synthesized
ucucuguccuaccugaaug

SEQ ID NO: 40998 - RNA, 19 nt, artificial
  Chemically synthesized
gugcuucacagucgucuuc

SEQ ID NO: 40999 - RNA, 19 nt, artificial
  Chemically synthesized
uaguucuugagcaccucgg

SEQ ID NO: 41000 - RNA, 19 nt, artificial
  Chemically synthesized
uuguacuugugguggaucc

SEQ ID NO: 41001 - RNA, 19 nt, artificial
  Chemically synthesized
uguauuuccaugucagcug

SEQ ID NO: 41002 - RNA, 19 nt, artificial
  Chemically synthesized
uacuugugguggauccagc

SEQ ID NO: 41003 - RNA, 19 nt, artificial
  Chemically synthesized
uucugcugcaucagguugu

SEQ ID NO: 41004 - RNA, 19 nt, artificial
  Chemically synthesized
aauacuuggagucugugcc

SEQ ID NO: 41005 - RNA, 19 nt, artificial
  Chemically synthesized
uaauacuuggagucugugc

SEQ ID NO: 41006 - RNA, 19 nt, artificial
  Chemically synthesized
uaguacugggcguccaugu

SEQ ID NO: 41007 - RNA, 19 nt, artificial
  Chemically synthesized
ugucaaacgagguaccauu

SEQ ID NO: 41008 - RNA, 19 nt, artificial
  Chemically synthesized
uucuugagcaccucgggaa

SEQ ID NO: 41009 - RNA, 19 nt, artificial
  Chemically synthesized
acguuguugacggagaugc

SEQ ID NO: 41010 - RNA, 19 nt, artificial
  Chemically synthesized
aacaacuguauuuccaugu

SEQ ID NO: 41011 - RNA, 19 nt, artificial
  Chemically synthesized
uggaugucaaacgagguac

SEQ ID NO: 41012 - RNA, 19 nt, artificial
  Chemically synthesized
aaccacagaacaaaacagc

SEQ ID NO: 41013 - RNA, 19 nt, artificial
  Chemically synthesized
aaacgagguaccauucuuc

SEQ ID NO: 41014 - RNA, 19 nt, artificial
  Chemically synthesized
ugugcucuggaucagcucu

SEQ ID NO: 41015 - RNA, 19 nt, artificial
  Chemically synthesized
acacugaacagguagggug

SEQ ID NO: 41016 - RNA, 19 nt, artificial
  Chemically synthesized
ccauucuucacguaggugc

SEQ ID NO: 41017 - RNA, 19 nt, artificial
  Chemically synthesized
uccaaugcacgaaacagau

SEQ ID NO: 41018 - RNA, 19 nt, artificial
  Chemically synthesized
ucaaacgagguaccauucu

SEQ ID NO: 41019 - RNA, 19 nt, artificial
  Chemically synthesized
aacgagguaccauucuuca

SEQ ID NO: 41020 - RNA, 19 nt, artificial
  Chemically synthesized
ccauaguggaugucaaacg

SEQ ID NO: 41021 - RNA, 19 nt, artificial
  Chemically synthesized
guagaaggagaagauguuc

SEQ ID NO: 41022 - RNA, 19 nt, artificial
  Chemically synthesized
caacuguauuuccauguca

SEQ ID NO: 41023 - RNA, 19 nt, artificial
  Chemically synthesized
cauucagguaggacagaga

SEQ ID NO: 41024 - RNA, 19 nt, Artificial
  Chemically synthesized
gaagacgacugugaagcac

SEQ ID NO: 41025 - RNA, 3963 nt, Homo sapiens
ggagagccgaaagcggagcucgaaacugacuggaaacuucaguggcgcggagacucgccaguuucaaccccggaaacuuuucuuugcaggaggagaagagaaggggugcaagcgcccccacuuuugcucuuuuuccuccccuccuccuccucuccaauucgccuccccccacuuggagcgggcagcugugaacuggccaccccgcgccuuccuaagugcucgccgcgguagccggccgacgcgccagcuuccccgggagccgcuugcuccgcauccgggcagccgaggggagaggagcccgcgccucgaguccccgagccgccgcggcuucucgccuuucccggccaccagcccccugccccgggcccgcguaugaaucuccuggaccccuucaugaagaugaccgacgagcaggagaagggccuguccggcgcccccagccccaccauguccgaggacuccgcgggcucgcccugcccgucgggcuccggcucggacaccgagaacacgcggccccaggagaacacguuccccaagggcgagcccgaucugaagaaggagagcgaggaggacaaguuccccgugugcauccgcgaggcggucagccaggugcucaaaggcuacgacuggacgcuggugcccaugccggugcgcgucaacggcuccagcaagaacaagccgcacgucaagcggcccaugaacgccuucauggugugggcgcaggcggcgcgcaggaagcucgcggaccaguacccgcacuugcacaacgccgagcucagcaagacgcugggcaagcucuggagacuucugaacgagagcgagaagcggcccuucguggaggaggcggagcggcugcgcgugcagcacaagaaggaccacccggauuacaaguaccagccgcggcggaggaagucggugaagaacgggcaggcggaggcagaggaggccacggagcagacgcacaucucccccaacgccaucuucaaggcgcugcaggccgacucgccacacuccuccuccggcaugagcgaggugcacucccccggcgagcacucggggcaaucccagggcccaccgaccccacccaccacccccaaaaccgacgugcagccgggcaaggcugaccugaagcgagaggggcgccccuugccagaggggggcagacagcccccuaucgacuuccgcgacguggacaucggcgagcugagcagcgacgucaucuccaacaucgagaccuucgaugucaacgaguuugaccaguaccugccgcccaacggccacccgggggugccggccacgcacggccaggucaccuacacgggcagcuacggcaucagcagcaccgcggccaccccggcgagcgcgggccacguguggauguccaagcagcaggcgccgccgccacccccgcagcagcccccacaggccccgccggccccgcaggcgcccccgcagccgcaggcggcgcccccacagcagccggcggcacccccgcagcagccacaggcgcacacgcugaccacgcugagcagcgagccgggccagucccagcgaacgcacaucaagacggagcagcugagccccagccacuacagcgagcagcagcagcacucgccccaacagaucgccuacagccccuucaaccucccacacuacagccccuccuacccgcccaucacccgcucacaguacgacuacaccgaccaccagaacuccagcuccuacuacagccacgcggcaggccagggcaccggccucuacuccaccuucaccuacaugaaccccgcucagcgccccauguacacccccaucgccgacaccucuggggucccuuccaucccgcagacccacagcccccagcacugggaacaacccgucuacacacagcucacucgaccuugaggaggccucccacgaagggcgaagauggccgagaugauccuaaaaauaaccgaagaaagagaggaccaaccagaauucccuuuggacauuuguguuuuuuuguuuuuuuauuuuguuuuguuuuuucuucuucuucuucuuccuuaaagacauuuaagcuaaaggcaacucguacccaaauuuccaagacacaaacaugaccuauccaagcgcauuacccacuuguggccaaucaguggccaggccaaccuuggcuaaauggagcagcgaaaucaacgagaaacuggacuuuuuaaacccucuucagagcaagcguggaggaugauggagaaucgugugaucagugugcuaaaucucucugccuguuuggacuuuguaauuauuuuuuuagcaguaauuaaagaaaaaaguccucugugaggaauauucucuauuuuaaauauuuuuaguauguacuguguaugauucauuaccauuuugaggggauuuauacauauuuuuagauaaaauuaaaugcucuuauuuuuccaacagcuaaacuacucuuaguugaacagugugcccuagcuuuucuugcaaccagaguauuuuuguacagauuugcuuucucuuacaaaaagaaaaaaaaaauccuguuguauuaacauuuaaaaacagaauuguguuaugugaucaguuuuggggguuaacuuugcuuaauuccucaggcuuugcgauuuaaggaggagcugccuuaaaaaaaaauaaaggccuuauuuugcaauuaugggaguaaacaauagucuagagaagcauuugguaagcuuuaucauauauauauuuuuuaaagaagagaaaaacaccuugagccuuaaaacggugcugcugggaaacauuugcacucuuuuagugcauuuccuccugccuuugcuuguucacugcagucuuaagaaagagguaaaaggcaagcaaaggagaugaaaucuguucugggaauguuucagcagccaauaagugcccgagcacacugcccccgguugccugccugggccccauguggaaggcagaugccugcucgcucugucaccugugccucucagaacaccagcaguuaaccuucaagacauuccacuugcuaaaauuauuuauuuuguaaggagagguuuuaauuaaaacaaaaaaaaauucuuuuuuuuuuuuuuuuccaauuuuaccuucuuuaaaauagguuguuggagcuuuccucaaaggguauggucaucuguuguuaaauuauguucuuaacuguaaccaguuuuuuuuuauuuaucucuuuaaucuuuuuuuauuauuaaaagcaaguuucuuuguauuccucacccuagauuuguauaaaugccuuuuuguccaucccuuuuuucuuuguuguuuuuguugaaaacaaacuggaaacuuguuucuuuuuuuguauaaaugagagauugcaaauguaguguaucacugagucauuugcaguguuuucugccacagaccuuugggcugccuuauauuguguguguguguggguguguguguguuuugacacaaaaacaaugcaagcaugugucauccauauuucucugcaucuucucuuggagugagggaggcuaccuggaggggaucagcccacugacagaccuuaaucuuaauuacugcuguggcuagagaguuugaggauugcuuuuuaaaaaagacagcaaacuuuuuuuuuuauuuaaaaaaagauauauuaacaguuuuagaagucaguagaauaaaaucuuaaagcacucauaauauggcauccuucaauuucuguauaaaagcagaucuuuuuaaaaagauacuucuguaacuuaagaaaccuggcauuuaaaucauauuuugucuuuagguaaaagcuuugguuuguguucguguuuuguuuguuucacuuguuucccucccagccccaaaccuuuuguucucuccgugaaacuuaccuuucccuuuuucuuucucuuuuuuuuuuuuguauauuauuguuuacaauaaauauacauugcauuaaaaagaaaaaaaaaaaaaaaaaaaaaaaaaaaaaaa

SEQ ID NO: 41026 - RNA, 4976 nt, Homo sapiens
gggcgggcgggccgcaggcugucgggcuggggcugaggcugaggcugagguugaggcggcggcggcggcggccgggugcccgggacagcgacgcagcgcgccggcggccgcgacagggccagcgagagccccgcagcccgccgcagcugccgccucgccgcggccgggccggagagcacggcggcgggagcgcggccuuaggaggcggccggagcggugggcacagcucggcgcggagcguccugucaggcggcggccgagggcgucgcggacucuccccgcgaugaugccgaugauauuaacuguuuucuugagcaacaaugaacagauuuuaacagaaguuccuauaacaccggaaacaaccugucgagauguuguagaauuuugcaaggaaccuggagaaggcagcugccauuuagcugaaguguggaggggaaaugaacgucccauacccuuugaucauaugauguacgaacaucuucagaaaugggguccacggagggaagaagugaaauuuuuccuucgacacgaggacuccccaacugagaacagugaacaagguggccgucagacccaagagcaacgaacucagagaaauguaauaaauguaccuggagaaaaacguacugaaaaugggguugggaauccacguguugaacuuacccucucagagcuccaagauauggcagcuaggcaacagcagcagauugaaaaucagcagcagauguugguugccaaggaacagcguuuacauuuucuaaagcaacaggagcgccgucagcagcagucuauuucugaaaaugaaaagcuucagaaauugaaagaacgaguugaagcccaggagaacaagcugaagaaaauucgugcaaugagaggacaagucgacuacagcaaaaucaugaacggcaaucugucugcugaaauagaaagguucagugccauguuccaggaaaagaagcaggaaguacagacugcaauuuuaaggguugaucagcuuagucagcaauuggaagauuuaaagaaaggaaaacugaauggguuccagucuuacaauggcaaauugacgggaccagcggcgguggaguuaaaaagacuguaccaagaacuacagauucguaaccaacuuaaccaggaacaaaauucaaaacuucagcagcagaaggaacucuuaaauaagcgcaacauggagguggccaugauggacaagcgaaucagugaacugcgugaacgucucuaugggaaaaaaauucagcugaaccgugugaauggcacgucaucaccacaguccccucugagcacaucgggcagggucgcugcuguggggccuuauauccagguucccagugccggaagcuuuccugugcugggggacccuauaaagccccagucucucaguauugccucaaaugcugcucauggaagauccaaauccgcuaaugauggaaacuggccaacauuaaaacagaauucuagcucuuccgugaaaccagugcagguggccggugcagacuggaaggauccgagcguggaggggucugucaagcagggcacugucuccagccagccugugcccuucucagcacugggacccacggagaagccgggcaucgagauugguaaagugccaccucccaucccggguguaggcaagcagcugccuccaagcuaugggacauacccaaguccuacaccucuggguccugggucgacaagcucccuggaaaggaggaaggaaggcagcuugcccaggcccagugcaggccugccaagucgacagaggcccacccugcugcccgccacaggcagcaccccccagccaggcuccucacaacagauucagcagaggauuuccguaccgccaagucccacguacccgccagcgggaccaccugcauuuccagcuggggacagcaagccugaacucccacugacaguggccauuaggccuuuccuggcugauaaagggucaaggccacagucucccaggaaaggaccccagacagugaauucaaguuccauauacuccauguaccuccagcaagccacaccaccuaagaauuaccagccggcagcacacagcgccuuaaauaagucaguuaaagcaguguaugguaagcccguuuuaccuucggguucaaccucuccaucgccgcugccguuucuucacgggucacuguccacgggcacaccacagccucagccaccuucagaaaguacugagaaagagccugagcaggauggccccgccgcccccgcagauggcagcaccguggagagccugccacggccacucagccccaccaagcucacgcccaucgugcauucgccacugcgcuaccagagugaugcagaccuggaggcccuccgcaggaagcuggccaacgcgccccggccccugaaaaagcgcagcuccaucacagagcccgagggccccggcgggcccaacauccagaagcugcuguaccagcgcuucaacacccuggccgguggcauggagggcaccccuuucuaccagcccagccccucccaggacuucaugggcaccuuggccgauguggacaauggaaacaccaaugccaauggaaaccuggaagagcuccccccugcccagcccacagccccacuccccgcugagccugccccgucaucagaugccaaugauaaugaguuaccuucccccgaaccagaggagcucaucuguccccaaaccacccaccaaacugccgagccggcagaggacaauaacaacaacguggccacgguccccaccacggagcagaucccgaguccuguggcugaggccccaucuccaggggaagagcaggucccuccagcaccucuucccccugccagccacccuccugccaccuccacgaacaagcggaccaacuugaagaagcccaacucggagcggacggggcacgggcugagaguccgguuuaacccccuggcacugcuccuagacgcgucucuggaaggagaguucgaucuggugcagaggaucaucuaugagguggaagaucccagcaagcccaacgacgaagggaucaccccacugcacaacgccgucugcgccggccaccaucacaucgugaaguuccugcuggauuuuggugucaacgugaaugcugcugauagugauggauggacgccgcugcacugcgcugccucuuguaacagcguucaccucugcaaacagcugguggagaguggugccgccauuuuugccucaaccauaagcgacauugaaacugcugcagacaagugugaggagauggaggaaggcuacauccagugcucccaguuucuauauggggugcaggaaaagcugggugugaugaacaaagguguggcguaugcucugugggacuacgaggcccagaacagugacgagcuguccuuccacgaaggggacgcccucaccauccugaggcgcaaggacgaaagcgagacugagugguggugggcucgccuuggagaccgggagggcuaugugcccaaaaaccugcuggggcuguauccacggaucaaaccccgacagcgaacacucgccugaacuuccuuuuggagcaccgcauggucuugccagcuaccaggagccacuuaagagauuauugugcuguuuuccaggaaagcugcagcuagaaaauggucuuaauggugcucacuuuagcagacagcguccacaaugugaauccuacaguuuccaggugaggcccuuucuccaguuugcccauuaacugggagagguacuuucgccuccaaggacugaauuuugccaauuacuauaaauccaaauaaauacccacuuucaaaacacccaccccucuugccauuaagaagucccauaacccccgguugguugccagugaagacagaagcucuuacugacuuggccccgaggccaucacccccuccagcagugaacacuguccgccgcugugaggccugcuccccugcgaccgcccugccccccgucaccgaaucggacacucauccuuucucacacuucccacacaugauccuucuucccuucaucaccaaaggagccucuguauggaaacauguccaguguugcugcccaguguguaugccucccaguacccacucugcucggccgccuuggggguuccgcuuccuguuccaguucaccuaaaggcugauugugcaggcccagcacuguggcuggacugccgcgccacgggcaccaggaccccuaagaccaagugacaacugggagagccucagcauauacucuucuccuccgaucucacagccugucaugcugcucagugugguucucaccccugcaagcucaaauucaguucccugaauggagucaggugcuggaggccguggcagcggagggugguugggguuggggcuggggguggacuggugugagggcagaccagggccagguagacggggcuguuuggugccugaaggauggcagacgccuggugucaggaggggccgccaccaaggagcagcagcuggggcagaggagcuggggucaggggccaccccucucugccgaucucccugccugggcuggcugugaggccaccuuugucccaggcccagccucaaggcaaggagggcgcuucacugaggugugaauuguacguacaggcuuuuuauauaccaaaaguauuuuuugacuagaccauucaaagcuacccgaacuauguuggaaauuuuuuuuuucucauuaaaauacaggcccuuaggcucuauuuuucauguaugagucguguguaauuuauguaaaaauguguguacagacucacugaugcagcacuguagcccaucaccuuggagcacugacuguacauaguguggugaagaaaagugaacgcccuuguagagcagcccgaccacaggagcauggccgcugccagcccagacgcugcugacgcuguguaaaugugcacaauaaacccgucucaccccggcaaaaaaaaaaaaaaaaa

SEQ ID NO: 41027 - RNA, 2205 nt, Homo sapiens
gcgcacgccggccgcgcccacgugaccgguccgggugcaaacacgcgggucagcugauccggcccaacugcggcgucaucccggcuauaagcgcacggccucggcgacccucuccgacccggccgccgccgccaugcagcccuccagccuucugccgcucgcccucugccugcuggcugcacccgccuccgcgcucgucaggaucccgcugcacaaguucacguccauccgccggaccaugucggagguugggggcucuguggaggaccugauugccaaaggccccgucucaaaguacucccaggcggugccagccgugaccgaggggcccauucccgaggugcucaagaacuacauggacgcccaguacuacggggagauuggcaucgggacgcccccccagugcuucacagucgucuucgacacgggcuccuccaaccuguggguccccuccauccacugcaaacugcuggacaucgcuugcuggauccaccacaaguacaacagcgacaaguccagcaccuacgugaagaaugguaccucguuugacauccacuauggcucgggcagccucuccggguaccugagccaggacacugugucggugcccugccagucagcgucgucagccucugcccugggcggugucaaaguggagaggcaggucuuuggggaggccaccaagcagccaggcaucaccuucaucgcagccaaguucgauggcauccugggcauggccuacccccgcaucuccgucaacaacgugcugcccgucuucgacaaccugaugcagcagaagcugguggaccagaacaucuucuccuucuaccugagcagggacccagaugcgcagccugggggugagcugaugcuggguggcacagacuccaaguauuacaaggguucucuguccuaccugaaugucacccgcaaggccuacuggcagguccaccuggaccagguggagguggccagcgggcugacccugugcaaggagggcugugaggccauuguggacacaggcacuucccucauggugggcccgguggaugaggugcgcgagcugcagaaggccaucggggccgugccgcugauucagggcgaguacaugauccccugugagaagguguccacccugcccgcgaucacacugaagcugggaggcaaaggcuacaagcuguccccagaggacuacacgcucaaggugucgcaggccgggaagacccucugccugagcggcuucaugggcauggacaucccgccacccagcgggccacucuggauccugggcgacgucuucaucggccgcuacuacacuguguuugaccgugacaacaacagggugggcuucgccgaggcugcccgccucuaguucccaaggcguccgcgcgccagcacagaaacagaggagagucccagagcaggaggccccuggcccagcggccccucccacacacacccacacacucgcccgcccacuguccugggcgcccuggaagccggcggcccaagcccgacuugcuguuuuguucugugguuuuccccucccuggguucagaaaugcugccugccugucugucucuccaucuguuugguggggguagagcugauccagagcacagaucuguuucgugcauuggaagaccccacccaagcuuggcagccgagcucguguauccuggggcucccuucaucuccagggaguccccuccccggcccuaccagcgcccgcugggcugagccccuaccccacaccaggccguccucccgggcccucccuuggaaaccugcccugccugagggccccucugcccagcuugggcccagcugggcucugccacccuaccuguucagugucccgggcccguugaggaugaggccgcuagaggccugaggaugagcuggaaggagugagaggggacaaaacccaccuuguuggagccugcaggguggugcugggacugagccagucccaggggcauguauuggccuggaggugggguugggauugggggcuggugccagccuuccucugcagcugaccucuguuguccuccccuugggcggcugagagccccagcugacauggaaauacaguuguuggccuccggccuccccucaaaaaaaaaaaaaaaaaaaaaaaaaaaaaaaaaaaaaaaaaaaaaaaaaaaaaaaaaaaaaaaaaaaaaaaaaaaaaaaaaaaaa

SEQ ID NO: 41028 - RNA, 1492 nt, Homo sapiens
cgggcgacagcagggccgcggugcaguguccgacccgagaguugcggccugagucaccggccccgcccuccggagccggacgcugcgggaggcccgggagcggcaguggaaccgacucccagaacuccggacgugugcggcgcagugagucgcagccauguuccugguuaacucguucuugaagggcggcggcggcggcggcgggggaggcgggggccugggugggggccugggaaaugugcuuggaggccugaucagcggggccgggggcggcggcggcggcggcggcggcggcggcggugguggaggcggcgguggcgguggaacggccaugcgcauccuaggcggagucaucagcgccaucagcgaggcggcugcgcaguacaacccggagcccccgcccccacgcacacauuacuccaacauugaggccaacgagagugaggagguccggcaguuccggagacucuuugcccagcuggcuggagaugacauggaggucagcgccacagaacucaugaacauucucaauaagguugugacacgacacccugaucugaagacugaugguuuuggcauugacacaugucgcagcaugguggccgugauggauagcgacaccacaggcaagcugggcuuugaggaauucaaguacuuguggaacaacaucaaaagguggcaggccauauacaaacaguucgacacugaccgaucagggaccauuugcaguagugaacucccaggugccuuugaggcagcaggguuccaccugaaugagcaucucuauaacaugaucauccgacgcuacucagaugaaagugggaacauggauuuugacaacuucaucagcugcuuggucaggcuggacgccauguuccgugccuucaaaucucuugacaaagauggcacuggacaaauccaggugaacauccaggaguggcugcagcugacuauguauuccugaacuggagccccagacccgcccccucacugccuugcuauaggagucaccuggagccucggucucucccagggccgauccugucugcagucacaucuuuguggggccugcugacccacaagcuuuuguucucucaguacuuguuacccagcuucucaacauccagggcccaauuugcccugccuggaguucccccuggcucuaggacacucuaacaagcucuguccacgggucuccccauucccaccaggcccugcacacacccacuccguaaccucuccccuguaccugugccaagccuagcacuugugaugccuccaugccccgagggcccucucucaguucugggaggaugacuccagucccugcacgcccuggcacacccuucacgguugcuacccaggcggccaagcuccagaccgugccagacccaggugccccagugccuuugucuauauucugcucccagccugccaggcccaggaggaaauaaacaugccccaguugcugaucucuaaaaaaaaaaaaaaa

SEQ ID NO: 41029 - RNA, 1489 nt, Homo sapiens
cgggcgacagcagggccgcggugcaguguccgacccgagaguugcggccugagucaccggccccgcccuccggagccggacgcugcgggaggcccgggagcggcaguggaaccgacucccagaacuccggacgugugcggcgugagucgcagccauguuccugguuaacucguucuugaagggcggcggcggcggcggcgggggaggcgggggccugggugggggccugggaaaugugcuuggaggccugaucagcggggccgggggcggcggcggcggcggcggcggcggcggcggugguggaggcggcgguggcgguggaacggccaugcgcauccuaggcggagucaucagcgccaucagcgaggcggcugcgcaguacaacccggagcccccgcccccacgcacacauuacuccaacauugaggccaacgagagugaggagguccggcaguuccggagacucuuugcccagcuggcuggagaugacauggaggucagcgccacagaacucaugaacauucucaauaagguugugacacgacacccugaucugaagacugaugguuuuggcauugacacaugucgcagcaugguggccgugauggauagcgacaccacaggcaagcugggcuuugaggaauucaaguacuuguggaacaacaucaaaagguggcaggccauauacaaacaguucgacacugaccgaucagggaccauuugcaguagugaacucccaggugccuuugaggcagcaggguuccaccugaaugagcaucucuauaacaugaucauccgacgcuacucagaugaaagugggaacauggauuuugacaacuucaucagcugcuuggucaggcuggacgccauguuccgugccuucaaaucucuugacaaagauggcacuggacaaauccaggugaacauccaggaguggcugcagcugacuauguauuccugaacuggagccccagacccgcccccucacugccuugcuauaggagucaccuggagccucggucucucccagggccgauccugucugcagucacaucuuuguggggccugcugacccacaagcuuuuguucucucaguacuuguuacccagcuucucaacauccagggcccaauuugcccugccuggaguucccccuggcucuaggacacucuaacaagcucuguccacgggucuccccauucccaccaggcccugcacacacccacuccguaaccucuccccuguaccugugccaagccuagcacuugugaugccuccaugccccgagggcccucucucaguucugggaggaugacuccagucccugcacgcccuggcacacccuucacgguugcuacccaggcggccaagcuccagaccgugccagacccaggugccccagugccuuugucuauauucugcucccagccugccaggcccaggaggaaauaaacaugccccaguugcugaucucuaaaaaaaaaaaaaaa

SEQ ID NO: 41030 - RNA, 2755 nt, Homo sapiens
ccuacccgcgcgcaggccaaguugcugaaucaauggagcccuccccaacccgggcguuccccagcgaggcuuccuucccauccuccugaccaccggggcuuuucgugagcucgucucugaucucgcgcaagagugacacacagguguucaaagacgcuucuggggagugagggaagcgguuuacgagugacuuggcuggagccucaggggcgggcacuggcacggaacacacccugaggccagcccuggcugcccaggcggagcugccucuucucccgcggguugguggacccgcucaguacggaguuggggaagcucuuucacuucggaggauugcucaacaaccaugcugggcaucuggacccuccuaccucugguucuuacgucuguugcuagauuaucguccaaaaguguuaaugcccaagugacugacaucaacuccaagggauuggaauugaggaagacuguuacuacaguugagacucagaacuuggaaggccugcaucaugauggccaauucugccauaagcccuguccuccaggugaaaggaaagcuagggacugcacagucaauggggaugaaccagacugcgugcccugccaagaagggaaggaguacacagacaaagcccauuuuucuuccaaaugcagaagauguagauugugugaugaaggacauggcuuagaaguggaaauaaacugcacccggacccagaauaccaagugcagauguaaaccaaacuuuuuuuguaacucuacuguaugugaacacugugacccuugcaccaaaugugaacauggaaucaucaaggaaugcacacucaccagcaacaccaagugcaaagaggaaggauccagaucuaacuugggguggcuuugucuucuucuuuugccaauuccacuaauuguuugggugaagagaaaggaaguacagaaaacaugcagaaagcacagaaaggaaaaccaagguucucaugaaucuccaaccuuaaauccugaaacaguggcaauaaauuuaucugauguugacuugaguaaauauaucaccacuauugcuggagucaugacacuaagucaaguuaaaggcuuuguucgaaagaauggugucaaugaagccaaaauagaugagaucaagaaugacaauguccaagacacagcagaacagaaaguucaacugcuucguaauuggcaucaacuucauggaaagaaagaagcguaugacacauugauuaaagaucucaaaaaagccaaucuuuguacucuugcagagaaaauucagacuaucauccucaaggacauuacuagugacucagaaaauucaaacuucagaaaugaaauccaaagcuuggucuagagugaaaaacaacaaauucaguucugaguauaugcaauuaguguuugaaaagauucuuaauagcuggcuguaaauacugcuugguuuuuuacuggguacauuuuaucauuuauuagcgcugaagagccaacauauuuguagauuuuuaauaucucaugauucugccuccaaggauguuuaaaaucuaguugggaaaacaaacuucaucaagaguaaaugcaguggcaugcuaaguacccaaauaggaguguaugcagaggaugaaagauuaagauuaugcucuggcaucuaacauaugauucuguaguaugaauguaaucaguguauguuaguacaaaugucuauccacaggcuaaccccacucuaugaaucaauagaagaagcuaugaccuuuugcugaaauaucaguuacugaacaggcaggccacuuugccucuaaauuaccucugauaauucuagagauuuuaccauauuucuaaacuuuguuuauaacucugagaagaucauauuuauguaaaguauauguauuugagugcagaauuuaaauaaggcucuaccucaaagaccuuugcacaguuuauuggugucauauuauacaauauuucaauugugaauucacauagaaaacauuaaauuauaauguuugacuauuauauauguguaugcauuuuacuggcucaaaacuaccuacuucuuucucaggcaucaaaagcauuuugagcaggagaguauuacuagagcuuugccaccucuccauuuuugccuuggugcucaucuuaauggccuaaugcacccccaaacauggaaauaucaccaaaaaauacuuaauaguccaccaaaaggcaagacugcccuuagaaauucuagccugguuuggagauacuaacugcucucagagaaaguagcuuugugacaugucaugaacccauguuugcaaucaaagaugauaaaauagauucuuauuuuucccccacccccgaaaauguucaauaaugucccauguaaaaccugcuacaaauggcagcuuauacauagcaaugguaaaaucaucaucuggauuuaggaauugcucuugucauacccccaaguuucuaagauuuaagauucuccuuacuacuauccuacguuuaaauaucuuugaaaguuuguauuaaaugugaauuuuaagaaauaauauuuauauuucuguaaauguaaacugugaagauaguuauaaacugaagcagauaccuggaaccaccuaaagaacuuccauuuauggaggauuuuuuugccccuuguguuuggaauuauaaaauauagguaaaaguacguaauuaaauaauguuuuugguaaaaaaaaaaaaaaaaaaaaaaaaaaaaaaaaaaaaaaaaaaaaaaaaaaaaaaaaaaaaaaaaaaa

SEQ ID NO: 41031 - RNA, 2730 nt, Homo sapiens
ccuacccgcgcgcaggccaaguugcugaaucaauggagcccuccccaacccgggcguuccccagcgaggcuuccuucccauccuccugaccaccggggcuuuucgugagcucgucucugaucucgcgcaagagugacacacagguguucaaagacgcuucuggggagugagggaagcgguuuacgagugacuuggcuggagccucaggggcgggcacuggcacggaacacacccugaggccagcccuggcugcccaggcggagcugccucuucucccgcggguugguggacccgcucaguacggaguuggggaagcucuuucacuucggaggauugcucaacaaccaugcugggcaucuggacccuccuaccucugguucuuacgucuguugcuagauuaucguccaaaaguguuaaugcccaagugacugacaucaacuccaagggauuggaauugaggaagacuguuacuacaguugagacucagaacuuggaaggccugcaucaugauggccaauucugccauaagcccuguccuccaggugaaaggaaagcuagggacugcacagucaauggggaugaaccagacugcgugcccugccaagaagggaaggaguacacagacaaagcccauuuuucuuccaaaugcagaagauguagauugugugaugaaggacauggcuuagaaguggaaauaaacugcacccggacccagaauaccaagugcagauguaaaccaaacuuuuuuuguaacucuacuguaugugaacacugugacccuugcaccaaaugugaacauggaaucaucaaggaaugcacacucaccagcaacaccaagugcaaagaggaaggauccagaucuaacuugggguggcuuugucuucuucuuuugccaauuccacuaauuguuugggugaagagaaaggaaguacagaaaacaugcagaaagcacagaaaggaaaaccaagguucucaugaaucuccaaccuuaaauccuauguugacuugaguaaauauaucaccacuauugcuggagucaugacacuaagucaaguuaaaggcuuuguucgaaagaauggugucaaugaagccaaaauagaugagaucaagaaugacaauguccaagacacagcagaacagaaaguucaacugcuucguaauuggcaucaacuucauggaaagaaagaagcguaugacacauugauuaaagaucucaaaaaagccaaucuuuguacucuugcagagaaaauucagacuaucauccucaaggacauuacuagugacucagaaaauucaaacuucagaaaugaaauccaaagcuuggucuagagugaaaaacaacaaauucaguucugaguauaugcaauuaguguuugaaaagauucuuaauagcuggcuguaaauacugcuugguuuuuuacuggguacauuuuaucauuuauuagcgcugaagagccaacauauuuguagauuuuuaauaucucaugauucugccuccaaggauguuuaaaaucuaguugggaaaacaaacuucaucaagaguaaaugcaguggcaugcuaaguacccaaauaggaguguaugcagaggaugaaagauuaagauuaugcucuggcaucuaacauaugauucuguaguaugaauguaaucaguguauguuaguacaaaugucuauccacaggcuaaccccacucuaugaaucaauagaagaagcuaugaccuuuugcugaaauaucaguuacugaacaggcaggccacuuugccucuaaauuaccucugauaauucuagagauuuuaccauauuucuaaacuuuguuuauaacucugagaagaucauauuuauguaaaguauauguauuugagugcagaauuuaaauaaggcucuaccucaaagaccuuugcacaguuuauuggugucauauuauacaauauuucaauugugaauucacauagaaaacauuaaauuauaauguuugacuauuauauauguguaugcauuuuacuggcucaaaacuaccuacuucuuucucaggcaucaaaagcauuuugagcaggagaguauuacuagagcuuugccaccucuccauuuuugccuuggugcucaucuuaauggccuaaugcacccccaaacauggaaauaucaccaaaaaauacuuaauaguccaccaaaaggcaagacugcccuuagaaauucuagccugguuuggagauacuaacugcucucagagaaaguagcuuugugacaugucaugaacccauguuugcaaucaaagaugauaaaauagauucuuauuuuucccccacccccgaaaauguucaauaaugucccauguaaaaccugcuacaaauggcagcuuauacauagcaaugguaaaaucaucaucuggauuuaggaauugcucuugucauacccccaaguuucuaagauuuaagauucuccuuacuacuauccuacguuuaaauaucuuugaaaguuuguauuaaaugugaauuuuaagaaauaauauuuauauuucuguaaauguaaacugugaagauaguuauaaacugaagcagauaccuggaaccaccuaaagaacuuccauuuauggaggauuuuuuugccccuuguguuuggaauuauaaaauauagguaaaaguacguaauuaaauaauguuuuugguaaaaaaaaaaaaaaaaaaaaaaaaaaaaaaaaaaaaaaaaaaaaaaaaaaaaaaaaaaaaaaaaaaa

SEQ ID NO: 41032 - RNA, 2692 nt, Homo sapiens
ccuacccgcgcgcaggccaaguugcugaaucaauggagcccuccccaacccgggcguuccccagcgaggcuuccuucccauccuccugaccaccggggcuuuucgugagcucgucucugaucucgcgcaagagugacacacagguguucaaagacgcuucuggggagugagggaagcgguuuacgagugacuuggcuggagccucaggggcgggcacuggcacggaacacacccugaggccagcccuggcugcccaggcggagcugccucuucucccgcggguugguggacccgcucaguacggaguuggggaagcucuuucacuucggaggauugcucaacaaccaugcugggcaucuggacccuccuaccucugguucuuacgucuguugcuagauuaucguccaaaaguguuaaugcccaagugacugacaucaacuccaagggauuggaauugaggaagacuguuacuacaguugagacucagaacuuggaaggccugcaucaugauggccaauucugccauaagcccuguccuccaggugaaaggaaagcuagggacugcacagucaauggggaugaaccagacugcgugcccugccaagaagggaaggaguacacagacaaagcccauuuuucuuccaaaugcagaagauguagauugugugaugaaggacauggcuuagaaguggaaauaaacugcacccggacccagaauaccaagugcagauguaaaccaaacuuuuuuuguaacucuacuguaugugaacacugugacccuugcaccaaaugugaacauggaaucaucaaggaaugcacacucaccagcaacaccaagugcaaagaggaagugaagagaaaggaaguacagaaaacaugcagaaagcacagaaaggaaaaccaagguucucaugaaucuccaaccuuaaauccugaaacaguggcaauaaauuuaucugauguugacuugaguaaauauaucaccacuauugcuggagucaugacacuaagucaaguuaaaggcuuuguucgaaagaauggugucaaugaagccaaaauagaugagaucaagaaugacaauguccaagacacagcagaacagaaaguucaacugcuucguaauuggcaucaacuucauggaaagaaagaagcguaugacacauugauuaaagaucucaaaaaagccaaucuuuguacucuugcagagaaaauucagacuaucauccucaaggacauuacuagugacucagaaaauucaaacuucagaaaugaaauccaaagcuuggucuagagugaaaaacaacaaauucaguucugaguauaugcaauuaguguuugaaaagauucuuaauagcuggcuguaaauacugcuugguuuuuuacuggguacauuuuaucauuuauuagcgcugaagagccaacauauuuguagauuuuuaauaucucaugauucugccuccaaggauguuuaaaaucuaguugggaaaacaaacuucaucaagaguaaaugcaguggcaugcuaaguacccaaauaggaguguaugcagaggaugaaagauuaagauuaugcucuggcaucuaacauaugauucuguaguaugaauguaaucaguguauguuaguacaaaugucuauccacaggcuaaccccacucuaugaaucaauagaagaagcuaugaccuuuugcugaaauaucaguuacugaacaggcaggccacuuugccucuaaauuaccucugauaauucuagagauuuuaccauauuucuaaacuuuguuuauaacucugagaagaucauauuuauguaaaguauauguauuugagugcagaauuuaaauaaggcucuaccucaaagaccuuugcacaguuuauuggugucauauuauacaauauuucaauugugaauucacauagaaaacauuaaauuauaauguuugacuauuauauauguguaugcauuuuacuggcucaaaacuaccuacuucuuucucaggcaucaaaagcauuuugagcaggagaguauuacuagagcuuugccaccucuccauuuuugccuuggugcucaucuuaauggccuaaugcacccccaaacauggaaauaucaccaaaaaauacuuaauaguccaccaaaaggcaagacugcccuuagaaauucuagccugguuuggagauacuaacugcucucagagaaaguagcuuugugacaugucaugaacccauguuugcaaucaaagaugauaaaauagauucuuauuuuucccccacccccgaaaauguucaauaaugucccauguaaaaccugcuacaaauggcagcuuauacauagcaaugguaaaaucaucaucuggauuuaggaauugcucuugucauacccccaaguuucuaagauuuaagauucuccuuacuacuauccuacguuuaaauaucuuugaaaguuuguauuaaaugugaauuuuaagaaauaauauuuauauuucuguaaauguaaacugugaagauaguuauaaacugaagcagauaccuggaaccaccuaaagaacuuccauuuauggaggauuuuuuugccccuuguguuuggaauuauaaaauauagguaaaaguacguaauuaaauaauguuuuugguaaaaaaaaaaaaaaaaaaaaaaaaaaaaaaaaaaaaaaaaaaaaaaaaaaaaaaaaaaaaaaaaaaa

SEQ ID NO: 41033 - RNA, 2646 nt, Homo sapiens
ccuacccgcgcgcaggccaaguugcugaaucaauggagcccuccccaacccgggcguuccccagcgaggcuuccuucccauccuccugaccaccggggcuuuucgugagcucgucucugaucucgcgcaagagugacacacagguguucaaagacgcuucuggggagugagggaagcgguuuacgagugacuuggcuggagccucaggggcgggcacuggcacggaacacacccugaggccagcccuggcugcccaggcggagcugccucuucucccgcggguugguggacccgcucaguacggaguuggggaagcucuuucacuucggaggauugcucaacaaccaugcugggcaucuggacccuccuaccucugguucuuacgucuguugcuagauuaucguccaaaaguguuaaugcccaagugacugacaucaacuccaagggauuggaauugaggaagacuguuacuacaguugagacucagaacuuggaaggccugcaucaugauggccaauucugccauaagcccuguccuccaggugaaaggaaagcuagggacugcacagucaauggggaugaaccagacugcgugcccugccaagaagggaaggaguacacagacaaagcccauuuuucuuccaaaugcagaagauguagauugugugaugaaggacaugaugugaacauggaaucaucaaggaaugcacacucaccagcaacaccaagugcaaagaggaaggauccagaucuaacuugggguggcuuugucuucuucuuuugccaauuccacuaauuguuugggugaagagaaaggaaguacagaaaacaugcagaaagcacagaaaggaaaaccaagguucucaugaaucuccaaccuuaaauccugaaacaguggcaauaaauuuaucugauguugacuugaguaaauauaucaccacuauugcuggagucaugacacuaagucaaguuaaaggcuuuguucgaaagaauggugucaaugaagccaaaauagaugagaucaagaaugacaauguccaagacacagcagaacagaaaguucaacugcuucguaauuggcaucaacuucauggaaagaaagaagcguaugacacauugauuaaagaucucaaaaaagccaaucuuuguacucuugcagagaaaauucagacuaucauccucaaggacauuacuagugacucagaaaauucaaacuucagaaaugaaauccaaagcuuggucuagagugaaaaacaacaaauucaguucugaguauaugcaauuaguguuugaaaagauucuuaauagcuggcuguaaauacugcuugguuuuuuacuggguacauuuuaucauuuauuagcgcugaagagccaacauauuuguagauuuuuaauaucucaugauucugccuccaaggauguuuaaaaucuaguugggaaaacaaacuucaucaagaguaaaugcaguggcaugcuaaguacccaaauaggaguguaugcagaggaugaaagauuaagauuaugcucuggcaucuaacauaugauucuguaguaugaauguaaucaguguauguuaguacaaaugucuauccacaggcuaaccccacucuaugaaucaauagaagaagcuaugaccuuuugcugaaauaucaguuacugaacaggcaggccacuuugccucuaaauuaccucugauaauucuagagauuuuaccauauuucuaaacuuuguuuauaacucugagaagaucauauuuauguaaaguauauguauuugagugcagaauuuaaauaaggcucuaccucaaagaccuuugcacaguuuauuggugucauauuauacaauauuucaauugugaauucacauagaaaacauuaaauuauaauguuugacuauuauauauguguaugcauuuuacuggcucaaaacuaccuacuucuuucucaggcaucaaaagcauuuugagcaggagaguauuacuagagcuuugccaccucuccauuuuugccuuggugcucaucuuaauggccuaaugcacccccaaacauggaaauaucaccaaaaaauacuuaauaguccaccaaaaggcaagacugcccuuagaaauucuagccugguuuggagauacuaacugcucucagagaaaguagcuuugugacaugucaugaacccauguuugcaaucaaagaugauaaaauagauucuuauuuuucccccacccccgaaaauguucaauaaugucccauguaaaaccugcuacaaauggcagcuuauacauagcaaugguaaaaucaucaucuggauuuaggaauugcucuugucauacccccaaguuucuaagauuuaagauucuccuuacuacuauccuacguuuaaauaucuuugaaaguuuguauuaaaugugaauuuuaagaaauaauauuuauauuucuguaaauguaaacugugaagauaguuauaaacugaagcagauaccuggaaccaccuaaagaacuuccauuuauggaggauuuuuuugccccuuguguuuggaauuauaaaauauagguaaaaguacguaauuaaauaauguuuuugguaaaaaaaaaaaaaaaaaaaaaaaaaaaaaaaaaaaaaaaaaaaaaaaaaaaaaaaaaaaaaaaaaaa

SEQ ID NO: 41034 - RNA, 2563 nt, Homo sapiens
ccuacccgcgcgcaggccaaguugcugaaucaauggagcccuccccaacccgggcguuccccagcgaggcuuccuucccauccuccugaccaccggggcuuuucgugagcucgucucugaucucgcgcaagagugacacacagguguucaaagacgcuucuggggagugagggaagcgguuuacgagugacuuggcuggagccucaggggcgggcacuggcacggaacacacccugaggccagcccuggcugcccaggcggagcugccucuucucccgcggguugguggacccgcucaguacggaguuggggaagcucuuucacuucggaggauugcucaacaaccaugcugggcaucuggacccuccuaccucugguucuuacgucuguugcuagauuaucguccaaaaguguuaaugcccaagugacugacaucaacuccaagggauuggaauugaggaagacuguuacuacaguugagacucagaacuuggaaggccugcaucaugauggccaauucugccauaagcccuguccuccaggugaaaggaaagcuagggacugcacagucaauggggaugaaccagacugcgugcccugccaagaagggaaggaguacacagacaaagcccauuuuucuuccaaaugcagaagauguagauugugugaugaaggacaugaugugaacauggaaucaucaaggaaugcacacucaccagcaacaccaagugcaaagaggaaggauccagaucuaacuugggguggcuuugucuucuucuuuugccaauuccacuaauuguuuggggaaacaguggcaauaaauuuaucugauguugacuugaguaaauauaucaccacuauugcuggagucaugacacuaagucaaguuaaaggcuuuguucgaaagaauggugucaaugaagccaaaauagaugagaucaagaaugacaauguccaagacacagcagaacagaaaguucaacugcuucguaauuggcaucaacuucauggaaagaaagaagcguaugacacauugauuaaagaucucaaaaaagccaaucuuuguacucuugcagagaaaauucagacuaucauccucaaggacauuacuagugacucagaaaauucaaacuucagaaaugaaauccaaagcuuggucuagagugaaaaacaacaaauucaguucugaguauaugcaauuaguguuugaaaagauucuuaauagcuggcuguaaauacugcuugguuuuuuacuggguacauuuuaucauuuauuagcgcugaagagccaacauauuuguagauuuuuaauaucucaugauucugccuccaaggauguuuaaaaucuaguugggaaaacaaacuucaucaagaguaaaugcaguggcaugcuaaguacccaaauaggaguguaugcagaggaugaaagauuaagauuaugcucuggcaucuaacauaugauucuguaguaugaauguaaucaguguauguuaguacaaaugucuauccacaggcuaaccccacucuaugaaucaauagaagaagcuaugaccuuuugcugaaauaucaguuacugaacaggcaggccacuuugccucuaaauuaccucugauaauucuagagauuuuaccauauuucuaaacuuuguuuauaacucugagaagaucauauuuauguaaaguauauguauuugagugcagaauuuaaauaaggcucuaccucaaagaccuuugcacaguuuauuggugucauauuauacaauauuucaauugugaauucacauagaaaacauuaaauuauaauguuugacuauuauauauguguaugcauuuuacuggcucaaaacuaccuacuucuuucucaggcaucaaaagcauuuugagcaggagaguauuacuagagcuuugccaccucuccauuuuugccuuggugcucaucuuaauggccuaaugcacccccaaacauggaaauaucaccaaaaaauacuuaauaguccaccaaaaggcaagacugcccuuagaaauucuagccugguuuggagauacuaacugcucucagagaaaguagcuuugugacaugucaugaacccauguuugcaaucaaagaugauaaaauagauucuuauuuuucccccacccccgaaaauguucaauaaugucccauguaaaaccugcuacaaauggcagcuuauacauagcaaugguaaaaucaucaucuggauuuaggaauugcucuugucauacccccaaguuucuaagauuuaagauucuccuuacuacuauccuacguuuaaauaucuuugaaaguuuguauuaaaugugaauuuuaagaaauaauauuuauauuucuguaaauguaaacugugaagauaguuauaaacugaagcagauaccuggaaccaccuaaagaacuuccauuuauggaggauuuuuuugccccuuguguuuggaauuauaaaauauagguaaaaguacguaauuaaauaauguuuuugguaaaaaaaaaaaaaaaaaaaaaaaaaaaaaaaaaaaaaaaaaaaaaaaaaaaaaaaaaaaaaaaaaaa

SEQ ID NO: 41035 - RNA, 2583 nt, Homo sapiens
ccuacccgcgcgcaggccaaguugcugaaucaauggagcccuccccaacccgggcguuccccagcgaggcuuccuucccauccuccugaccaccggggcuuuucgugagcucgucucugaucucgcgcaagagugacacacagguguucaaagacgcuucuggggagugagggaagcgguuuacgagugacuuggcuggagccucaggggcgggcacuggcacggaacacacccugaggccagcccuggcugcccaggcggagcugccucuucucccgcggguugguggacccgcucaguacggaguuggggaagcucuuucacuucggaggauugcucaacaaccaugcugggcaucuggacccuccuaccucugguucuuacgucuguugcuagauuaucguccaaaaguguuaaugcccaagugacugacaucaacuccaagggauuggaauugaggaagacuguuacuacaguugagacucagaacuuggaaggccugcaucaugauggccaauucugccauaagcccuguccuccaggugaaaggaaagcuagggacugcacagucaauggggaugaaccagacugcgugcccugccaagaagggaaggaguacacagacaaagcccauuuuucuuccaaaugcagaagauguagauugugugaugaaggacaugaugugaacauggaaucaucaaggaaugcacacucaccagcaacaccaagugcaaagaggaagugaagagaaaggaaguacagaaaacaugcagaaagcacagaaaggaaaaccaagguucucaugaaucuccaaccuuaaauccugaaacaguggcaauaaauuuaucugauguugacuugaguaaauauaucaccacuauugcuggagucaugacacuaagucaaguuaaaggcuuuguucgaaagaauggugucaaugaagccaaaauagaugagaucaagaaugacaauguccaagacacagcagaacagaaaguucaacugcuucguaauuggcaucaacuucauggaaagaaagaagcguaugacacauugauuaaagaucucaaaaaagccaaucuuuguacucuugcagagaaaauucagacuaucauccucaaggacauuacuagugacucagaaaauucaaacuucagaaaugaaauccaaagcuuggucuagagugaaaaacaacaaauucaguucugaguauaugcaauuaguguuugaaaagauucuuaauagcuggcuguaaauacugcuugguuuuuuacuggguacauuuuaucauuuauuagcgcugaagagccaacauauuuguagauuuuuaauaucucaugauucugccuccaaggauguuuaaaaucuaguugggaaaacaaacuucaucaagaguaaaugcaguggcaugcuaaguacccaaauaggaguguaugcagaggaugaaagauuaagauuaugcucuggcaucuaacauaugauucuguaguaugaauguaaucaguguauguuaguacaaaugucuauccacaggcuaaccccacucuaugaaucaauagaagaagcuaugaccuuuugcugaaauaucaguuacugaacaggcaggccacuuugccucuaaauuaccucugauaauucuagagauuuuaccauauuucuaaacuuuguuuauaacucugagaagaucauauuuauguaaaguauauguauuugagugcagaauuuaaauaaggcucuaccucaaagaccuuugcacaguuuauuggugucauauuauacaauauuucaauugugaauucacauagaaaacauuaaauuauaauguuugacuauuauauauguguaugcauuuuacuggcucaaaacuaccuacuucuuucucaggcaucaaaagcauuuugagcaggagaguauuacuagagcuuugccaccucuccauuuuugccuuggugcucaucuuaauggccuaaugcacccccaaacauggaaauaucaccaaaaaauacuuaauaguccaccaaaaggcaagacugcccuuagaaauucuagccugguuuggagauacuaacugcucucagagaaaguagcuuugugacaugucaugaacccauguuugcaaucaaagaugauaaaauagauucuuauuuuucccccacccccgaaaauguucaauaaugucccauguaaaaccugcuacaaauggcagcuuauacauagcaaugguaaaaucaucaucuggauuuaggaauugcucuugucauacccccaaguuucuaagauuuaagauucuccuuacuacuauccuacguuuaaauaucuuugaaaguuuguauuaaaugugaauuuuaagaaauaauauuuauauuucuguaaauguaaacugugaagauaguuauaaacugaagcagauaccuggaaccaccuaaagaacuuccauuuauggaggauuuuuuugccccuuguguuuggaauuauaaaauauagguaaaaguacguaauuaaauaauguuuuugguaaaaaaaaaaaaaaaaaaaaaaaaaaaaaaaaaaaaaaaaaaaaaaaaaaaaaaaaaaaaaaaaaaa

SEQ ID NO: 41036 - RNA, 2508 nt, Homo sapiens
ccuacccgcgcgcaggccaaguugcugaaucaauggagcccuccccaacccgggcguuccccagcgaggcuuccuucccauccuccugaccaccggggcuuuucgugagcucgucucugaucucgcgcaagagugacacacagguguucaaagacgcuucuggggagugagggaagcgguuuacgagugacuuggcuggagccucaggggcgggcacuggcacggaacacacccugaggccagcccuggcugcccaggcggagcugccucuucucccgcggguugguggacccgcucaguacggaguuggggaagcucuuucacuucggaggauugcucaacaaccaugcugggcaucuggacccuccuaccucugguucuuacgucuguugcuagauuaucguccaaaaguguuaaugcccaagugacugacaucaacuccaagggauuggaauugaggaagacuguuacuacaguugagacucagaacuuggaaggccugcaucaugauggccaauucugccauaagcccuguccuccagaugugaacauggaaucaucaaggaaugcacacucaccagcaacaccaagugcaaagaggaaggauccagaucuaacuugggguggcuuugucuucuucuuuugccaauuccacuaauuguuugggugaagagaaaggaaguacagaaaacaugcagaaagcacagaaaggaaaaccaagguucucaugaaucuccaaccuuaaauccugaaacaguggcaauaaauuuaucugauguugacuugaguaaauauaucaccacuauugcuggagucaugacacuaagucaaguuaaaggcuuuguucgaaagaauggugucaaugaagccaaaauagaugagaucaagaaugacaauguccaagacacagcagaacagaaaguucaacugcuucguaauuggcaucaacuucauggaaagaaagaagcguaugacacauugauuaaagaucucaaaaaagccaaucuuuguacucuugcagagaaaauucagacuaucauccucaaggacauuacuagugacucagaaaauucaaacuucagaaaugaaauccaaagcuuggucuagagugaaaaacaacaaauucaguucugaguauaugcaauuaguguuugaaaagauucuuaauagcuggcuguaaauacugcuugguuuuuuacuggguacauuuuaucauuuauuagcgcugaagagccaacauauuuguagauuuuuaauaucucaugauucugccuccaaggauguuuaaaaucuaguugggaaaacaaacuucaucaagaguaaaugcaguggcaugcuaaguacccaaauaggaguguaugcagaggaugaaagauuaagauuaugcucuggcaucuaacauaugauucuguaguaugaauguaaucaguguauguuaguacaaaugucuauccacaggcuaaccccacucuaugaaucaauagaagaagcuaugaccuuuugcugaaauaucaguuacugaacaggcaggccacuuugccucuaaauuaccucugauaauucuagagauuuuaccauauuucuaaacuuuguuuauaacucugagaagaucauauuuauguaaaguauauguauuugagugcagaauuuaaauaaggcucuaccucaaagaccuuugcacaguuuauuggugucauauuauacaauauuucaauugugaauucacauagaaaacauuaaauuauaauguuugacuauuauauauguguaugcauuuuacuggcucaaaacuaccuacuucuuucucaggcaucaaaagcauuuugagcaggagaguauuacuagagcuuugccaccucuccauuuuugccuuggugcucaucuuaauggccuaaugcacccccaaacauggaaauaucaccaaaaaauacuuaauaguccaccaaaaggcaagacugcccuuagaaauucuagccugguuuggagauacuaacugcucucagagaaaguagcuuugugacaugucaugaacccauguuugcaaucaaagaugauaaaauagauucuuauuuuucccccacccccgaaaauguucaauaaugucccauguaaaaccugcuacaaauggcagcuuauacauagcaaugguaaaaucaucaucuggauuuaggaauugcucuugucauacccccaaguuucuaagauuuaagauucuccuuacuacuauccuacguuuaaauaucuuugaaaguuuguauuaaaugugaauuuuaagaaauaauauuuauauuucuguaaauguaaacugugaagauaguuauaaacugaagcagauaccuggaaccaccuaaagaacuuccauuuauggaggauuuuuuugccccuuguguuuggaauuauaaaauauagguaaaaguacguaauuaaauaauguuuuugguaaaaaaaaaaaaaaaaaaaaaaaaaaaaaaaaaaaaaaaaaaaaaaaaaaaaaaaaaaaaaaaaaaa

SEQ ID NO: 41037 - RNA, 2445 nt, Homo sapiens
ccuacccgcgcgcaggccaaguugcugaaucaauggagcccuccccaacccgggcguuccccagcgaggcuuccuucccauccuccugaccaccggggcuuuucgugagcucgucucugaucucgcgcaagagugacacacagguguucaaagacgcuucuggggagugagggaagcgguuuacgagugacuuggcuggagccucaggggcgggcacuggcacggaacacacccugaggccagcccuggcugcccaggcggagcugccucuucucccgcggguugguggacccgcucaguacggaguuggggaagcucuuucacuucggaggauugcucaacaaccaugcugggcaucuggacccuccuaccucugguucuuacgucuguugcuagauuaucguccaaaaguguuaaugcccaagugacugacaucaacuccaagggauuggaauugaggaagacuguuacuacaguugagacucagaacuuggaaggccugcaucaugauggccaauucugccauaagcccuguccuccagaugugaacauggaaucaucaaggaaugcacacucaccagcaacaccaagugcaaagaggaagugaagagaaaggaaguacagaaaacaugcagaaagcacagaaaggaaaaccaagguucucaugaaucuccaaccuuaaauccugaaacaguggcaauaaauuuaucugauguugacuugaguaaauauaucaccacuauugcuggagucaugacacuaagucaaguuaaaggcuuuguucgaaagaauggugucaaugaagccaaaauagaugagaucaagaaugacaauguccaagacacagcagaacagaaaguucaacugcuucguaauuggcaucaacuucauggaaagaaagaagcguaugacacauugauuaaagaucucaaaaaagccaaucuuuguacucuugcagagaaaauucagacuaucauccucaaggacauuacuagugacucagaaaauucaaacuucagaaaugaaauccaaagcuuggucuagagugaaaaacaacaaauucaguucugaguauaugcaauuaguguuugaaaagauucuuaauagcuggcuguaaauacugcuugguuuuuuacuggguacauuuuaucauuuauuagcgcugaagagccaacauauuuguagauuuuuaauaucucaugauucugccuccaaggauguuuaaaaucuaguugggaaaacaaacuucaucaagaguaaaugcaguggcaugcuaaguacccaaauaggaguguaugcagaggaugaaagauuaagauuaugcucuggcaucuaacauaugauucuguaguaugaauguaaucaguguauguuaguacaaaugucuauccacaggcuaaccccacucuaugaaucaauagaagaagcuaugaccuuuugcugaaauaucaguuacugaacaggcaggccacuuugccucuaaauuaccucugauaauucuagagauuuuaccauauuucuaaacuuuguuuauaacucugagaagaucauauuuauguaaaguauauguauuugagugcagaauuuaaauaaggcucuaccucaaagaccuuugcacaguuuauuggugucauauuauacaauauuucaauugugaauucacauagaaaacauuaaauuauaauguuugacuauuauauauguguaugcauuuuacuggcucaaaacuaccuacuucuuucucaggcaucaaaagcauuuugagcaggagaguauuacuagagcuuugccaccucuccauuuuugccuuggugcucaucuuaauggccuaaugcacccccaaacauggaaauaucaccaaaaaauacuuaauaguccaccaaaaggcaagacugcccuuagaaauucuagccugguuuggagauacuaacugcucucagagaaaguagcuuugugacaugucaugaacccauguuugcaaucaaagaugauaaaauagauucuuauuuuucccccacccccgaaaauguucaauaaugucccauguaaaaccugcuacaaauggcagcuuauacauagcaaugguaaaaucaucaucuggauuuaggaauugcucuugucauacccccaaguuucuaagauuuaagauucuccuuacuacuauccuacguuuaaauaucuuugaaaguuuguauuaaaugugaauuuuaagaaauaauauuuauauuucuguaaauguaaacugugaagauaguuauaaacugaagcagauaccuggaaccaccuaaagaacuuccauuuauggaggauuuuuuugccccuuguguuuggaauuauaaaauauagguaaaaguacguaauuaaauaauguuuuugguaaaaaaaaaaaaaaaaaaaaaaaaaaaaaaaaaaaaaaaaaaaaaaaaaaaaaaaaaaaaaaaaaaa

SEQ ID NO: 41038 - RNA, 1909 nt, Homo sapiens
gagguguuucccuuagcuauggaaacucuauaagagagauccagcuugccuccucuugagcagucagcaacagggucccguccuugacaccucagccucuacaggacugagaagaaguaaaaccguuugcuggggcuggccugacucaccagcugccaugcagcagcccuucaauuacccauauccccagaucuacuggguggacagcagugccagcucucccugggccccuccaggcacaguucuucccuguccaaccucugugcccagaaggccuggucaaaggaggccaccaccaccaccgccaccgccaccacuaccaccuccgccgccgccgccaccacugccuccacuaccgcugccaccccugaagaagagagggaaccacagcacaggccugugucuccuugugauguuuuucaugguucugguugccuugguaggauugggccuggggauguuucagcucuuccaccuacagaaggagcuggcagaacuccgagagucuaccagccagaugcacacagcaucaucuuuggagaagcaaauaggccaccccaguccacccccugaaaaaaaggagcugaggaaaguggcccauuuaacaggcaaguccaacucaagguccaugccucuggaaugggaagacaccuauggaauuguccugcuuucuggagugaaguauaagaaggguggccuugugaucaaugaaacugggcuguacuuuguauauuccaaaguauacuuccggggucaaucuugcaacaaccugccccugagccacaaggucuacaugaggaacucuaaguauccccaggaucuggugaugauggaggggaagaugaugagcuacugcacuacugggcagaugugggcccgcagcagcuaccugggggcaguguucaaucuuaccagugcugaucauuuauaugucaacguaucugagcucucucuggucaauuuugaggaaucucagacguuuuucggcuuauauaagcucuaagagaagcacuuugggauucuuuccauuaugauucuuuguuacaggcaccgagaauguuguauucagugagggucuucuuacaugcauuugaggucaaguaagaagacaugaaccaaguggaccuugagaccacaggguucaaaaugucuguagcuccucaacucaccuaauguuuaugagccagacaaauggaggaauaugacggaagaacauagaacucugggcugccaugugaagagggagaagcaugaaaaagcagcuaccagguguucuacacucaucuuagugccugagaguauuuaggcagauugaaaaggacaccuuuuaacucaccucucaaggugggccuugcuaccucaagggggacugucuuucagauacaugguugugaccugaggauuuaagggauggaaaaggaagacuagaggcuugcauaauaagcuaaagaggcugaaagaggccaaugccccacuggcagcaucuucacuucuaaaugcauauccugagccaucggugaaacuaacagauaagcaagagagauguuuuggggacucauuucauuccuaacacagcauguguauuuccagugcaauuguagggguguguguguguguguguguguguguguguguaugacuaaagagagaauguagauauugugaaguacauauuaggaaaauauggguugcauuuggucaagauuuugaaugcuuccugacaaucaacucuaauagugcuuaaaaaucauugauugucagcuacuaaugauguuuuccuauaauauaauaaauauuuauguagaugugcauuuuugugaaaugaaaacauguaauaaaaaguauauguuaggauacaaaaaaaaaaaaaaaaaaaaaaaaaaaaaaaaaaaaaaaaaaaaaaaaaaaa

SEQ ID NO: 41039 - protein, 509 aa, Homo sapiens
MNLLDPFMKMTDEQEKGLSGAPSPTMSEDSAGSPCPSGSGSDTENTRPQENTFPKGEPDLKKESEEDKFPVCIREAVSQVLKGYDWTLVPMPVRVNGSSKNKPHVKRPMNAFMVWAQAARRKLADQYPHLHNAELSKTLGKLWRLLNESEKRPFVEEAERLRVQHKKDHPDYKYQPRRRKSVKNGQAEAEEATEQTHISPNAIFKALQADSPHSSSGMSEVHSPGEHSGQSQGPPTPPTTPKTDVQPGKADLKREGRPLPEGGRQPPIDFRDVDIGELSSDVISNIETFDVNEFDQYLPPNGHPGVPATHGQVTYTGSYGISSTAATPASAGHVWMSKQQAPPPPPQQPPQAPPAPQAPPQPQAAPPQQPAAPPQQPQAHTLTTLSSEPGQSQRTHIKTEQLSPSHYSEQQQHSPQQIAYSPFNLPHYSPSYPPITRSQYDYTDHQNSSSYYSHAAGQGTGLYSTFTYMNPAQRPMYTPIADTSGVPSIPQTHSPQHWEQPVYTQLTRP

SEQ ID NO: 41040 - protein, 1090 aa, Homo sapiens
MMPMILTVFLSNNEQILTEVPITPETTCRDVVEFCKEPGEGSCHLAEVWRGNERPIPFDHMMYEHLQKWGPRREEVKFFLRHEDSPTENSEQGGRQTQEQRTQRNVINVPGEKRTENGVGNPRVELTLSELQDMAARQQQQIENQQQMLVAKEQRLHFLKQQERRQQQSISENEKLQKLKERVEAQENKLKKIRAMRGQVDYSKIMNGNLSAEIERFSAMFQEKKQEVQTAILRVDQLSQQLEDLKKGKLNGFQSYNGKLTGPAAVELKRLYQELQIRNQLNQEQNSKLQQQKELLNKRNMEVAMMDKRISELRERLYGKKIQLNRVNGTSSPQSPLSTSGRVAAVGPYIQVPSAGSFPVLGDPIKPQSLSIASNAAHGRSKSANDGNWPTLKQNSSSSVKPVQVAGADWKDPSVEGSVKQGTVSSQPVPFSALGPTEKPGIEIGKVPPPIPGVGKQLPPSYGTYPSPTPLGPGSTSSLERRKEGSLPRPSAGLPSRQRPTLLPATGSTPQPGSSQQIQQRISVPPSPTYPPAGPPAFPAGDSKPELPLTVAIRPFLADKGSRPQSPRKGPQTVNSSSIYSMYLQQATPPKNYQPAAHSALNKSVKAVYGKPVLPSGSTSPSPLPFLHGSLSTGTPQPQPPSESTEKEPEQDGPAAPADGSTVESLPRPLSPTKLTPIVHSPLRYQSDADLEALRRKLANAPRPLKKRSSITEPEGPGGPNIQKLLYQRFNTLAGGMEGTPFYQPSPSQDFMGTLADVDNGNTNANGNLEELPPAQPTAPLPAEPAPSSDANDNELPSPEPEELICPQTTHQTAEPAEDNNNNVATVPTTEQIPSPVAEAPSPGEEQVPPAPLPPASHPPATSTNKRTNLKKPNSERTGHGLRVRFNPLALLLDASLEGEFDLVQRIIYEVEDPSKPNDEGITPLHNAVCAGHHHIVKFLLDFGVNVNAADSDGWTPLHCAASCNSVHLCKQLVESGAAIFASTISDIETAADKCEEMEEGYIQCSQFLYGVQEKLGVMNKGVAYALWDYEAQNSDELSFHEGDALTILRRKDESETEWWWARLGDREGYVPKNLLGLYPRIKPRQRTLA

SEQ ID NO: 41041 - protein, 412 aa, Homo sapiens
MQPSSLLPLALCLLAAPASALVRIPLHKFTSIRRTMSEVGGSVEDLIAKGPVSKYSQAVPAVTEGPIPEVLKNYMDAQYYGEIGIGTPPQCFTVVFDTGSSNLWVPSIHCKLLDIACWIHHKYNSDKSSTYVKNGTSFDIHYGSGSLSGYLSQDTVSVPCQSASSASALGGVKVERQVFGEATKQPGITFIAAKFDGILGMAYPRISVNNVLPVFDNLMQQKLVDQNIFSFYLSRDPDAQPGGELMLGGTDSKYYKGSLSYLNVTRKAYWQVHLDQVEVASGLTLCKEGCEAIVDTGTSLMVGPVDEVRELQKAIGAVPLIQGEYMIPCEKVSTLPAITLKLGGKGYKLSPEDYTLKVSQAGKTLCLSGFMGMDIPPPSGPLWILGDVFIGRYYTVFDRDNNRVGFAEAARL

SEQ ID NO: 41042 - protein, 268 aa, Homo sapiens
MFLVNSFLKGGGGGGGGGGGLGGGLGNVLGGLISGAGGGGGGGGGGGGGGGGGGGGTAMRILGGVISAISEAAAQYNPEPPPPRTHYSNIEANESEEVRQFRRLFAQLAGDDMEVSATELMNILNKVVTRHPDLKTDGFGIDTCRSMVAVMDSDTTGKLGFEEFKYLWNNIKRWQAIYKQFDTDRSGTICSSELPGAFEAAGFHLNEHLYNMIIRRYSDESGNMDFDNFISCLVRLDAMFRAFKSLDKDGTGQIQVNIQEWLQLTMYS

SEQ ID NO: 41043 - protein, 268 aa, Homo sapiens; identical to SEQ ID NO: 41042

SEQ ID NO: 41044 - protein, 335 aa, Homo sapiens
MLGIWTLLPLVLTSVARLSSKSVNAQVTDINSKGLELRKTVTTVETQNLEGLHHDGQFCHKPCPPGERKARDCTVNGDEPDCVPCQEGKEYTDKAHFSSKCRRCRLCDEGHGLEVEINCTRTQNTKCRCKPNFFCNSTVCEHCDPCTKCEHGIIKECTLTSNTKCKEEGSRSNLGWLCLLLLPIPLIVWVKRKEVQKTCRKHRKENQGSHESPTLNPETVAINLSDVDLSKYITTIAGVMTLSQVKGFVRKNGVNEAKIDEIKNDNVQDTAEQKVQLLRNWHQLHGKKEAYDTLIKDLKKANLCTLAEKIQTIILKDITSDSENSNFRNEIQSLV

SEQ ID NO: 41045 - protein, 220 aa, Homo sapiens
MLGIWTLLPLVLTSVARLSSKSVNAQVTDINSKGLELRKTVTTVETQNLEGLHHDGQFCHKPCPPGERKARDCTVNGDEPDCVPCQEGKEYTDKAHFSSKCRRCRLCDEGHGLEVEINCTRTQNTKCRCKPNFFCNSTVCEHCDPCTKCEHGIIKECTLTSNTKCKEEGSRSNLGWLCLLLLPIPLIVWVKRKEVQKTCRKHRKENQGSHESPTLNPMLT

SEQ ID NO: 41046 - protein, 314 aa, Homo sapiens
MLGIWTLLPLVLTSVARLSSKSVNAQVTDINSKGLELRKTVTTVETQNLEGLHHDGQFCHKPCPPGERKARDCTVNGDEPDCVPCQEGKEYTDKAHFSSKCRRCRLCDEGHGLEVEINCTRTQNTKCRCKPNFFCNSTVCEHCDPCTKCEHGIIKECTLTSNTKCKEEVKRKEVQKTCRKHRKENQGSHESPTLNPETVAINLSDVDLSKYITTIAGVMTLSQVKGFVRKNGVNEAKIDEIKNDNVQDTAEQKVQLLRNWHQLHGKKEAYDTLIKDLKKANLCTLAEKIQTIILKDITSDSENSNFRNEIQSLV

SEQ ID NO: 41047 - protein, 149 aa, Homo sapiens
MLGIWTLLPLVLTSVARLSSKSVNAQVTDINSKGLELRKTVTTVETQNLEGLHHDGQFCHKPCPPGERKARDCTVNGDEPDCVPCQEGKEYTDKAHFSSKCRRCRLCDEGHDVNMESSRNAHSPATPSAKRKDPDLTWGGFVFFFCQFH

SEQ ID NO: 41048 - protein, 149 aa, Homo sapiens; identical to SEQ ID NO: 41047

SEQ ID NO: 41049 - protein, 132 aa, Homo sapiens
MLGIWTLLPLVLTSVARLSSKSVNAQVTDINSKGLELRKTVTTVETQNLEGLHHDGQFCHKPCPPGERKARDCTVNGDEPDCVPCQEGKEYTDKAHFSSKCRRCRLCDEGHDVNMESSRNAHSPATPSAKRK

SEQ ID NO: 41050 - protein, 103 aa, Homo sapiens
MLGIWTLLPLVLTSVARLSSKSVNAQVTDINSKGLELRKTVTTVETQNLEGLHHDGQFCHKPCPPDVNMESSRNAHSPATPSAKRKDPDLTWGGFVFFFCQFH

SEQ ID NO: 41051 - protein, 86 aa, Homo sapiens
MLGIWTLLPLVLTSVARLSSKSVNAQVTDINSKGLELRKTVTTVETQNLEGLHHDGQFCHKPCPPDVNMESSRNAHSPATPSAKRK

SEQ ID NO: 41052 - protein, 281 aa, Homo sapiens
MQQPFNYPYPQIYWVDSSASSPWAPPGTVLPCPTSVPRRPGQRRPPPPPPPPPLPPPPPPPPLPPLPLPPLKKRGNHSTGLCLLVMFFMVLVALVGLGLGMFQLFHLQKELAELRESTSQMHTASSLEKQIGHPSPPPEKKELRKVAHLTGKSNSRSMPLEWEDTYGIVLLSGVKYKKGGLVINETGLYFVYSKVYFRGQSCNNLPLSHKVYMRNSKYPQDLVMMEGKMMSYCTTGQMWARSSYLGAVFNLTSADHLYVNVSELSLVNFEESQTFFGLYKL
